United States Patent Application Publication US 2021/0061914 A1 - sequence listing, part 5

SEQ ID NO: 90311 - protein, 9 aa, Homo sapiens
  Table A; Target 90311; HLA-A*32:01; TRPM1; ENSG00000134160; TAA
QIAMKLLTY

SEQ ID NO: 90312 - protein, 9 aa, Homo sapiens
  Table A; Target 90312; HLA-B*15:01; TRPM1; ENSG00000134160; TAA
QIAMKLLTY

SEQ ID NO: 90313 - protein, 9 aa, Homo sapiens
  Table A; Target 90313; HLA-C*02:02; TRPM1; ENSG00000134160; TAA
QIAMKLLTY

SEQ ID NO: 90314 - protein, 9 aa, Homo sapiens
  Table A; Target 90314; HLA-C*07:04; TRPM1; ENSG00000134160; TAA
QIAMKLLTY

SEQ ID NO: 90315 - protein, 9 aa, Homo sapiens
  Table A; Target 90315; HLA-C*16:01; TRPM1; ENSG00000134160; TAA
QIAMKLLTY

SEQ ID NO: 90316 - protein, 9 aa, Homo sapiens
  Table A; Target 90316; HLA-A*02:07; TRPM1; ENSG00000134160; TAA
QIDLYAMEI

SEQ ID NO: 90317 - protein, 9 aa, Homo sapiens
  Table A; Target 90317; HLA-B*57:01; TRPM1; ENSG00000134160; TAA
QIFVFGPHW

SEQ ID NO: 90318 - protein, 10 aa, Homo sapiens
  Table A; Target 90318; HLA-A*02:01; TRPM1; ENSG00000134160; TAA
QLEELSNRMV

SEQ ID NO: 90319 - protein, 9 aa, Homo sapiens
  Table A; Target 90319; HLA-A*02:01; TRPM1; ENSG00000134160; TAA
QLFAIIMEC

SEQ ID NO: 90320 - protein, 9 aa, Homo sapiens
  Table A; Target 90320; HLA-A*02:03; TRPM1; ENSG00000134160; TAA
QLFAIIMEC

SEQ ID NO: 90321 - protein, 9 aa, Homo sapiens
  Table A; Target 90321; HLA-B*13:02; TRPM1; ENSG00000134160; TAA
QLTVETTNI

SEQ ID NO: 90322 - protein, 8 aa, Homo sapiens
  Table A; Target 90322; HLA-B*37:01; TRPM1; ENSG00000134160; TAA
QNSLHLSL

SEQ ID NO: 90323 - protein, 8 aa, Homo sapiens
  Table A; Target 90323; HLA-B*08:01; TRPM1; ENSG00000134160; TAA
QPKLKQVF

SEQ ID NO: 90324 - protein, 10 aa, Homo sapiens
  Table A; Target 90324; HLA-B*51:01; TRPM1; ENSG00000134160; TAA
QPYMGYGRVI

SEQ ID NO: 90325 - protein, 9 aa, Homo sapiens
  Table A; Target 90325; HLA-B*38:01; TRPM1; ENSG00000134160; TAA
QQDIEMAIL

SEQ ID NO: 90326 - protein, 9 aa, Homo sapiens
  Table A; Target 90326; HLA-B*38:01; TRPM1; ENSG00000134160; TAA
QQSSSDERI

SEQ ID NO: 90327 - protein, 9 aa, Homo sapiens
  Table A; Target 90327; HLA-B*27:05; TRPM1; ENSG00000134160; TAA
QRGEESMAK

SEQ ID NO: 90328 - protein, 9 aa, Homo sapiens
  Table A; Target 90328; HLA-B*27:05; TRPM1; ENSG00000134160; TAA
QRSIPIGTK

SEQ ID NO: 90329 - protein, 9 aa, Homo sapiens
  Table A; Target 90329; HLA-B*27:02; TRPM1; ENSG00000134160; TAA
QRYQLIMTF

SEQ ID NO: 90330 - protein, 9 aa, Homo sapiens
  Table A; Target 90330; HLA-C*16:04; TRPM1; ENSG00000134160; TAA
QRYQLIMTF

SEQ ID NO: 90331 - protein, 10 aa, Homo sapiens
  Table A; Target 90331; HLA-A*01:01; TRPM1; ENSG00000134160; TAA
QSSINSADGY

SEQ ID NO: 90332 - protein, 10 aa, Homo sapiens
  Table A; Target 90332; HLA-A*30:02; TRPM1; ENSG00000134160; TAA
QSSINSADGY

SEQ ID NO: 90333 - protein, 8 aa, Homo sapiens
  Table A; Target 90333; HLA-A*01:01; TRPM1; ENSG00000134160; TAA
QSYPTDSY

SEQ ID NO: 90334 - protein, 8 aa, Homo sapiens
  Table A; Target 90334; HLA-A*30:02; TRPM1; ENSG00000134160; TAA
QSYPTDSY

SEQ ID NO: 90335 - protein, 8 aa, Homo sapiens
  Table A; Target 90335; HLA-A*32:01; TRPM1; ENSG00000134160; TAA
QSYPTDSY

SEQ ID NO: 90336 - protein, 8 aa, Homo sapiens
  Table A; Target 90336; HLA-B*15:03; TRPM1; ENSG00000134160; TAA
QSYPTDSY

SEQ ID NO: 90337 - protein, 8 aa, Homo sapiens
  Table A; Target 90337; HLA-B*46:01; TRPM1; ENSG00000134160; TAA
QSYPTDSY

SEQ ID NO: 90338 - protein, 8 aa, Homo sapiens
  Table A; Target 90338; HLA-C*16:02; TRPM1; ENSG00000134160; TAA
QSYPTDSY

SEQ ID NO: 90339 - protein, 9 aa, Homo sapiens
  Table A; Target 90339; HLA-A*03:01; TRPM1; ENSG00000134160; TAA
QTLGFPSLR

SEQ ID NO: 90340 - protein, 9 aa, Homo sapiens
  Table A; Target 90340; HLA-A*11:01; TRPM1; ENSG00000134160; TAA
QTLGFPSLR

SEQ ID NO: 90341 - protein, 9 aa, Homo sapiens
  Table A; Target 90341; HLA-A*31:01; TRPM1; ENSG00000134160; TAA
QTLGFPSLR

SEQ ID NO: 90342 - protein, 9 aa, Homo sapiens
  Table A; Target 90342; HLA-A*33:01; TRPM1; ENSG00000134160; TAA
QTLGFPSLR

SEQ ID NO: 90343 - protein, 9 aa, Homo sapiens
  Table A; Target 90343; HLA-A*33:03; TRPM1; ENSG00000134160; TAA
QTLGFPSLR

SEQ ID NO: 90344 - protein, 9 aa, Homo sapiens
  Table A; Target 90344; HLA-A*68:01; TRPM1; ENSG00000134160; TAA
QTLGFPSLR

SEQ ID NO: 90345 - protein, 9 aa, Homo sapiens
  Table A; Target 90345; HLA-C*07:06; TRPM1; ENSG00000134160; TAA
QTLGFPSLR

SEQ ID NO: 90346 - protein, 11 aa, Homo sapiens
  Table A; Target 90346; HLA-A*03:01; TRPM1; ENSG00000134160; TAA
QTLGFPSLRSK

SEQ ID NO: 90347 - protein, 11 aa, Homo sapiens
  Table A; Target 90347; HLA-A*03:02; TRPM1; ENSG00000134160; TAA
QTLGFPSLRSK

SEQ ID NO: 90348 - protein, 11 aa, Homo sapiens
  Table A; Target 90348; HLA-A*11:01; TRPM1; ENSG00000134160; TAA
QTLGFPSLRSK

SEQ ID NO: 90349 - protein, 11 aa, Homo sapiens
  Table A; Target 90349; HLA-A*31:01; TRPM1; ENSG00000134160; TAA
QTLGFPSLRSK

SEQ ID NO: 90350 - protein, 9 aa, Homo sapiens
  Table A; Target 90350; HLA-A*01:01; TRPM1; ENSG00000134160; TAA
QTMSNPLSK

SEQ ID NO: 90351 - protein, 9 aa, Homo sapiens
  Table A; Target 90351; HLA-A*03:01; TRPM1; ENSG00000134160; TAA
QTMSNPLSK

SEQ ID NO: 90352 - protein, 9 aa, Homo sapiens
  Table A; Target 90352; HLA-A*03:02; TRPM1; ENSG00000134160; TAA
QTMSNPLSK

SEQ ID NO: 90353 - protein, 9 aa, Homo sapiens
  Table A; Target 90353; HLA-A*11:01; TRPM1; ENSG00000134160; TAA
QTMSNPLSK

SEQ ID NO: 90354 - protein, 9 aa, Homo sapiens
  Table A; Target 90354; HLA-A*33:03; TRPM1; ENSG00000134160; TAA
QTMSNPLSK

SEQ ID NO: 90355 - protein, 9 aa, Homo sapiens
  Table A; Target 90355; HLA-A*68:01; TRPM1; ENSG00000134160; TAA
QTMSNPLSK

SEQ ID NO: 90356 - protein, 9 aa, Homo sapiens
  Table A; Target 90356; HLA-C*07:06; TRPM1; ENSG00000134160; TAA
QTMSNPLSK

SEQ ID NO: 90357 - protein, 10 aa, Homo sapiens
  Table A; Target 90357; HLA-A*03:01; TRPM1; ENSG00000134160; TAA
QTMSNPLSKL

SEQ ID NO: 90358 - protein, 10 aa, Homo sapiens
  Table A; Target 90358; HLA-A*03:02; TRPM1; ENSG00000134160; TAA
QTMSNPLSKL

SEQ ID NO: 90359 - protein, 10 aa, Homo sapiens
  Table A; Target 90359; HLA-A*11:01; TRPM1; ENSG00000134160; TAA
QTMSNPLSKL

SEQ ID NO: 90360 - protein, 10 aa, Homo sapiens
  Table A; Target 90360; HLA-A*25:01; TRPM1; ENSG00000134160; TAA
QTMSNPLSKL

SEQ ID NO: 90361 - protein, 10 aa, Homo sapiens
  Table A; Target 90361; HLA-A*26:01; TRPM1; ENSG00000134160; TAA
QTMSNPLSKL

SEQ ID NO: 90362 - protein, 10 aa, Homo sapiens
  Table A; Target 90362; HLA-A*33:03; TRPM1; ENSG00000134160; TAA
QTMSNPLSKL

SEQ ID NO: 90363 - protein, 10 aa, Homo sapiens
  Table A; Target 90363; HLA-A*68:01; TRPM1; ENSG00000134160; TAA
QTMSNPLSKL

SEQ ID NO: 90364 - protein, 10 aa, Homo sapiens
  Table A; Target 90364; HLA-A*68:02; TRPM1; ENSG00000134160; TAA
QTMSNPLSKL

SEQ ID NO: 90365 - protein, 10 aa, Homo sapiens
  Table A; Target 90365; HLA-B*57:01; TRPM1; ENSG00000134160; TAA
QTMSNPLSKL

SEQ ID NO: 90366 - protein, 10 aa, Homo sapiens
  Table A; Target 90366; HLA-B*58:01; TRPM1; ENSG00000134160; TAA
QTMSNPLSKL

SEQ ID NO: 90367 - protein, 10 aa, Homo sapiens
  Table A; Target 90367; HLA-A*25:01; TRPM1; ENSG00000134160; TAA
QTVDLRLAQL

SEQ ID NO: 90368 - protein, 10 aa, Homo sapiens
  Table A; Target 90368; HLA-A*26:01; TRPM1; ENSG00000134160; TAA
QTVDLRLAQL

SEQ ID NO: 90369 - protein, 10 aa, Homo sapiens
  Table A; Target 90369; HLA-A*68:02; TRPM1; ENSG00000134160; TAA
QTVDLRLAQL

SEQ ID NO: 90370 - protein, 9 aa, Homo sapiens
  Table A; Target 90370; HLA-A*01:01; TRPM1; ENSG00000134160; TAA
QVETQPEKW

SEQ ID NO: 90371 - protein, 9 aa, Homo sapiens
  Table A; Target 90371; HLA-A*25:01; TRPM1; ENSG00000134160; TAA
QVETQPEKW

SEQ ID NO: 90372 - protein, 9 aa, Homo sapiens
  Table A; Target 90372; HLA-A*32:01; TRPM1; ENSG00000134160; TAA
QVETQPEKW

SEQ ID NO: 90373 - protein, 9 aa, Homo sapiens
  Table A; Target 90373; HLA-B*44:03; TRPM1; ENSG00000134160; TAA
QVETQPEKW

SEQ ID NO: 90374 - protein, 9 aa, Homo sapiens
  Table A; Target 90374; HLA-B*57:01; TRPM1; ENSG00000134160; TAA
QVETQPEKW

SEQ ID NO: 90375 - protein, 9 aa, Homo sapiens
  Table A; Target 90375; HLA-B*58:01; TRPM1; ENSG00000134160; TAA
QVETQPEKW

SEQ ID NO: 90376 - protein, 9 aa, Homo sapiens
  Table A; Target 90376; HLA-C*16:04; TRPM1; ENSG00000134160; TAA
QVETQPEKW

SEQ ID NO: 90377 - protein, 9 aa, Homo sapiens
  Table A; Target 90377; HLA-A*03:01; TRPM1; ENSG00000134160; TAA
QVFGKGLIK

SEQ ID NO: 90378 - protein, 9 aa, Homo sapiens
  Table A; Target 90378; HLA-A*03:02; TRPM1; ENSG00000134160; TAA
QVFGKGLIK

SEQ ID NO: 90379 - protein, 9 aa, Homo sapiens
  Table A; Target 90379; HLA-A*11:01; TRPM1; ENSG00000134160; TAA
QVFGKGLIK

SEQ ID NO: 90380 - protein, 9 aa, Homo sapiens
  Table A; Target 90380; HLA-A*31:01; TRPM1; ENSG00000134160; TAA
QVFGKGLIK

SEQ ID NO: 90381 - protein, 10 aa, Homo sapiens
  Table A; Target 90381; HLA-A*02:03; TRPM1; ENSG00000134160; TAA
QVFGKGLIKA

SEQ ID NO: 90382 - protein, 10 aa, Homo sapiens
  Table A; Target 90382; HLA-A*68:02; TRPM1; ENSG00000134160; TAA
QVFGKGLIKA

SEQ ID NO: 90383 - protein, 10 aa, Homo sapiens
  Table A; Target 90383; HLA-A*24:02; TRPM1; ENSG00000134160; TAA
QYPFHELMVW

SEQ ID NO: 90384 - protein, 11 aa, Homo sapiens
  Table A; Target 90384; HLA-A*03:02; TRPM1; ENSG00000134160; TAA
RASDILSFAHK

SEQ ID NO: 90385 - protein, 11 aa, Homo sapiens
  Table A; Target 90385; HLA-A*11:01; TRPM1; ENSG00000134160; TAA
RASDILSFAHK

SEQ ID NO: 90386 - protein, 10 aa, Homo sapiens
  Table A; Target 90386; HLA-A*30:02; TRPM1; ENSG00000134160; TAA
RASSECEATY

SEQ ID NO: 90387 - protein, 10 aa, Homo sapiens
  Table A; Target 90387; HLA-B*15:01; TRPM1; ENSG00000134160; TAA
RASSECEATY

SEQ ID NO: 90388 - protein, 8 aa, Homo sapiens
  Table A; Target 90388; HLA-B*37:01; TRPM1; ENSG00000134160; TAA
RDFIAHTC

SEQ ID NO: 90389 - protein, 8 aa, Homo sapiens
  Table A; Target 90389; HLA-B*37:01; TRPM1; ENSG00000134160; TAA
RDVKKSNL

SEQ ID NO: 90390 - protein, 11 aa, Homo sapiens
  Table A; Target 90390; HLA-B*40:01; TRPM1; ENSG00000134160; TAA
REILMSEPGKL

SEQ ID NO: 90391 - protein, 8 aa, Homo sapiens
  Table A; Target 90391; HLA-B*37:01; TRPM1; ENSG00000134160; TAA
REQLLVTI

SEQ ID NO: 90392 - protein, 8 aa, Homo sapiens
  Table A; Target 90392; HLA-B*49:01; TRPM1; ENSG00000134160; TAA
REQLLVTI

SEQ ID NO: 90393 - protein, 9 aa, Homo sapiens
  Table A; Target 90393; HLA-A*30:01; TRPM1; ENSG00000134160; TAA
RETFMKTSL

SEQ ID NO: 90394 - protein, 9 aa, Homo sapiens
  Table A; Target 90394; HLA-B*37:01; TRPM1; ENSG00000134160; TAA
RETFMKTSL

SEQ ID NO: 90395 - protein, 9 aa, Homo sapiens
  Table A; Target 90395; HLA-B*40:01; TRPM1; ENSG00000134160; TAA
RETFMKTSL

SEQ ID NO: 90396 - protein, 9 aa, Homo sapiens
  Table A; Target 90396; HLA-B*40:02; TRPM1; ENSG00000134160; TAA
RETFMKTSL

SEQ ID NO: 90397 - protein, 9 aa, Homo sapiens
  Table A; Target 90397; HLA-B*44:03; TRPM1; ENSG00000134160; TAA
RETFMKTSL

SEQ ID NO: 90398 - protein, 9 aa, Homo sapiens
  Table A; Target 90398; HLA-A*24:02; TRPM1; ENSG00000134160; TAA
RFQYPFHEL

SEQ ID NO: 90399 - protein, 11 aa, Homo sapiens
  Table A; Target 90399; HLA-A*03:01; TRPM1; ENSG00000134160; TAA
RLAQLEELSNR

SEQ ID NO: 90400 - protein, 11 aa, Homo sapiens
  Table A; Target 90400; HLA-A*31:01; TRPM1; ENSG00000134160; TAA
RLAQLEELSNR

SEQ ID NO: 90401 - protein, 10 aa, Homo sapiens
  Table A; Target 90401; HLA-A*02:04; TRPM1; ENSG00000134160; TAA
RLEELYNTRL

SEQ ID NO: 90402 - protein, 10 aa, Homo sapiens
  Table A; Target 90402; HLA-A*02:07; TRPM1; ENSG00000134160; TAA
RLEELYNTRL

SEQ ID NO: 90403 - protein, 9 aa, Homo sapiens
  Table A; Target 90403; HLA-A*03:01; TRPM1; ENSG00000134160; TAA
RLGPPNTLH

SEQ ID NO: 90404 - protein, 9 aa, Homo sapiens
  Table A; Target 90404; HLA-A*03:02; TRPM1; ENSG00000134160; TAA
RLGPPNTLH

SEQ ID NO: 90405 - protein, 11 aa, Homo sapiens
  Table A; Target 90405; HLA-A*02:04; TRPM1; ENSG00000134160; TAA
RLGPPNTLHLL

SEQ ID NO: 90406 - protein, 11 aa, Homo sapiens
  Table A; Target 90406; HLA-A*03:01; TRPM1; ENSG00000134160; TAA
RLGPPNTLHLL

SEQ ID NO: 90407 - protein, 11 aa, Homo sapiens
  Table A; Target 90407; HLA-A*31:01; TRPM1; ENSG00000134160; TAA
RLGPPNTLHLL

SEQ ID NO: 90408 - protein, 9 aa, Homo sapiens
  Table A; Target 90408; HLA-A*02:01; TRPM1; ENSG00000134160; TAA
RLGQGVPLV

SEQ ID NO: 90409 - protein, 9 aa, Homo sapiens
  Table A; Target 90409; HLA-A*02:03; TRPM1; ENSG00000134160; TAA
RLGQGVPLV

SEQ ID NO: 90410 - protein, 9 aa, Homo sapiens
  Table A; Target 90410; HLA-A*02:04; TRPM1; ENSG00000134160; TAA
RLGQGVPLV

SEQ ID NO: 90411 - protein, 11 aa, Homo sapiens
  Table A; Target 90411; HLA-A*02:04; TRPM1; ENSG00000134160; TAA
RLGQGVPLVGL

SEQ ID NO: 90412 - protein, 10 aa, Homo sapiens
  Table A; Target 90412; HLA-A*02:03; TRPM1; ENSG00000134160; TAA
RLHEFEEQCV

SEQ ID NO: 90413 - protein, 9 aa, Homo sapiens
  Table A; Target 90413; HLA-A*02:01; TRPM1; ENSG00000134160; TAA
RLLEKHISL

SEQ ID NO: 90414 - protein, 9 aa, Homo sapiens
  Table A; Target 90414; HLA-A*02:03; TRPM1; ENSG00000134160; TAA
RLLEKHISL

SEQ ID NO: 90415 - protein, 9 aa, Homo sapiens
  Table A; Target 90415; HLA-A*02:04; TRPM1; ENSG00000134160; TAA
RLLEKHISL

SEQ ID NO: 90416 - protein, 9 aa, Homo sapiens
  Table A; Target 90416; HLA-A*02:07; TRPM1; ENSG00000134160; TAA
RLLEKHISL

SEQ ID NO: 90417 - protein, 9 aa, Homo sapiens
  Table A; Target 90417; HLA-A*03:01; TRPM1; ENSG00000134160; TAA
RLLEKHISL

SEQ ID NO: 90418 - protein, 9 aa, Homo sapiens
  Table A; Target 90418; HLA-A*31:01; TRPM1; ENSG00000134160; TAA
RLLEKHISL

SEQ ID NO: 90419 - protein, 9 aa, Homo sapiens
  Table A; Target 90419; HLA-B*08:01; TRPM1; ENSG00000134160; TAA
RLLEKHISL

SEQ ID NO: 90420 - protein, 9 aa, Homo sapiens
  Table A; Target 90420; HLA-B*37:01; TRPM1; ENSG00000134160; TAA
RLLEKHISL

SEQ ID NO: 90421 - protein, 11 aa, Homo sapiens
  Table A; Target 90421; HLA-A*03:01; TRPM1; ENSG00000134160; TAA
RLLEKHISLQK

SEQ ID NO: 90422 - protein, 9 aa, Homo sapiens
  Table A; Target 90422; HLA-A*02:01; TRPM1; ENSG00000134160; TAA
RLPPCIPGA

SEQ ID NO: 90423 - protein, 9 aa, Homo sapiens
  Table A; Target 90423; HLA-A*02:07; TRPM1; ENSG00000134160; TAA
RLPPCIPGA

SEQ ID NO: 90424 - protein, 10 aa, Homo sapiens
  Table A; Target 90424; HLA-A*03:01; TRPM1; ENSG00000134160; TAA
RLQNQPYMGY

SEQ ID NO: 90425 - protein, 10 aa, Homo sapiens
  Table A; Target 90425; HLA-A*03:02; TRPM1; ENSG00000134160; TAA
RLQNQPYMGY

SEQ ID NO: 90426 - protein, 10 aa, Homo sapiens
  Table A; Target 90426; HLA-A*29:02; TRPM1; ENSG00000134160; TAA
RLQNQPYMGY

SEQ ID NO: 90427 - protein, 10 aa, Homo sapiens
  Table A; Target 90427; HLA-A*30:02; TRPM1; ENSG00000134160; TAA
RLQNQPYMGY

SEQ ID NO: 90428 - protein, 10 aa, Homo sapiens
  Table A; Target 90428; HLA-B*15:01; TRPM1; ENSG00000134160; TAA
RLQNQPYMGY

SEQ ID NO: 90429 - protein, 9 aa, Homo sapiens
  Table A; Target 90429; HLA-A*03:01; TRPM1; ENSG00000134160; TAA
RMRKNPGLK

SEQ ID NO: 90430 - protein, 9 aa, Homo sapiens
  Table A; Target 90430; HLA-A*02:04; TRPM1; ENSG00000134160; TAA
RMVNALENL

SEQ ID NO: 90431 - protein, 9 aa, Homo sapiens
  Table A; Target 90431; HLA-B*58:01; TRPM1; ENSG00000134160; TAA
RMVNALENL

SEQ ID NO: 90432 - protein, 9 aa, Homo sapiens
  Table A; Target 90432; HLA-B*07:02; TRPM1; ENSG00000134160; TAA
RPVLPPPMI

SEQ ID NO: 90433 - protein, 9 aa, Homo sapiens
  Table A; Target 90433; HLA-B*51:01; TRPM1; ENSG00000134160; TAA
RPVLPPPMI

SEQ ID NO: 90434 - protein, 9 aa, Homo sapiens
  Table A; Target 90434; HLA-B*56:01; TRPM1; ENSG00000134160; TAA
RPVLPPPMI

SEQ ID NO: 90435 - protein, 9 aa, Homo sapiens
  Table A; Target 90435; HLA-C*07:02; TRPM1; ENSG00000134160; TAA
RPVLPPPMI

SEQ ID NO: 90436 - protein, 11 aa, Homo sapiens
  Table A; Target 90436; HLA-A*30:02; TRPM1; ENSG00000134160; TAA
RQSSINSADGY

SEQ ID NO: 90437 - protein, 11 aa, Homo sapiens
  Table A; Target 90437; HLA-B*15:01; TRPM1; ENSG00000134160; TAA
RQSSINSADGY

SEQ ID NO: 90438 - protein, 11 aa, Homo sapiens
  Table A; Target 90438; HLA-B*15:03; TRPM1; ENSG00000134160; TAA
RQSSINSADGY

SEQ ID NO: 90439 - protein, 9 aa, Homo sapiens
  Table A; Target 90439; HLA-A*31:01; TRPM1; ENSG00000134160; TAA
RSFVYSRGR

SEQ ID NO: 90440 - protein, 9 aa, Homo sapiens
  Table A; Target 90440; HLA-B*57:01; TRPM1; ENSG00000134160; TAA
RSFVYSRGR

SEQ ID NO: 90441 - protein, 9 aa, Homo sapiens
  Table A; Target 90441; HLA-A*23:01; TRPM1; ENSG00000134160; TAA
RSIPIGTKI

SEQ ID NO: 90442 - protein, 9 aa, Homo sapiens
  Table A; Target 90442; HLA-A*32:01; TRPM1; ENSG00000134160; TAA
RSIPIGTKI

SEQ ID NO: 90443 - protein, 9 aa, Homo sapiens
  Table A; Target 90443; HLA-B*57:01; TRPM1; ENSG00000134160; TAA
RSIPIGTKI

SEQ ID NO: 90444 - protein, 9 aa, Homo sapiens
  Table A; Target 90444; HLA-B*58:01; TRPM1; ENSG00000134160; TAA
RSIPIGTKI

SEQ ID NO: 90445 - protein, 10 aa, Homo sapiens
  Table A; Target 90445; HLA-A*31:01; TRPM1; ENSG00000134160; TAA
RSKSLHGHPR

SEQ ID NO: 90446 - protein, 11 aa, Homo sapiens
  Table A; Target 90446; HLA-A*03:01; TRPM1; ENSG00000134160; TAA
RTLYNNLFGPK

SEQ ID NO: 90447 - protein, 9 aa, Homo sapiens
  Table A; Target 90447; HLA-A*02:07; TRPM1; ENSG00000134160; TAA
RVDFVKLLI

SEQ ID NO: 90448 - protein, 8 aa, Homo sapiens
  Table A; Target 90448; HLA-A*02:04; TRPM1; ENSG00000134160; TAA
RVLDIFGV

SEQ ID NO: 90449 - protein, 10 aa, Homo sapiens
  Table A; Target 90449; HLA-A*03:01; TRPM1; ENSG00000134160; TAA
RVLDIFGVNK

SEQ ID NO: 90450 - protein, 10 aa, Homo sapiens
  Table A; Target 90450; HLA-A*03:02; TRPM1; ENSG00000134160; TAA
RVLDIFGVNK

SEQ ID NO: 90451 - protein, 10 aa, Homo sapiens
  Table A; Target 90451; HLA-A*11:01; TRPM1; ENSG00000134160; TAA
RVLDIFGVNK

SEQ ID NO: 90452 - protein, 10 aa, Homo sapiens
  Table A; Target 90452; HLA-A*31:01; TRPM1; ENSG00000134160; TAA
RVLDIFGVNK

SEQ ID NO: 90453 - protein, 11 aa, Homo sapiens
  Table A; Target 90453; HLA-A*29:02; TRPM1; ENSG00000134160; TAA
RVLDIFGVNKY

SEQ ID NO: 90454 - protein, 11 aa, Homo sapiens
  Table A; Target 90454; HLA-A*30:02; TRPM1; ENSG00000134160; TAA
RVLDIFGVNKY

SEQ ID NO: 90455 - protein, 11 aa, Homo sapiens
  Table A; Target 90455; HLA-B*57:01; TRPM1; ENSG00000134160; TAA
RVLDIFGVNKY

SEQ ID NO: 90456 - protein, 10 aa, Homo sapiens
  Table A; Target 90456; HLA-A*03:01; TRPM1; ENSG00000134160; TAA
RVYQTMSNPL

SEQ ID NO: 90457 - protein, 11 aa, Homo sapiens
  Table A; Target 90457; HLA-A*24:02; TRPM1; ENSG00000134160; TAA
RYHFNGEELLF

SEQ ID NO: 90458 - protein, 8 aa, Homo sapiens
  Table A; Target 90458; HLA-A*24:02; TRPM1; ENSG00000134160; TAA
RYQLIMTF

SEQ ID NO: 90459 - protein, 8 aa, Homo sapiens
  Table A; Target 90459; HLA-A*01:01; TRPM1; ENSG00000134160; TAA
SADGYSLY

SEQ ID NO: 90460 - protein, 8 aa, Homo sapiens
  Table A; Target 90460; HLA-C*05:01; TRPM1; ENSG00000134160; TAA
SADGYSLY

SEQ ID NO: 90461 - protein, 9 aa, Homo sapiens
  Table A; Target 90461; HLA-A*11:01; TRPM1; ENSG00000134160; TAA
SADGYSLYR

SEQ ID NO: 90462 - protein, 9 aa, Homo sapiens
  Table A; Target 90462; HLA-A*33:01; TRPM1; ENSG00000134160; TAA
SADGYSLYR

SEQ ID NO: 90463 - protein, 9 aa, Homo sapiens
  Table A; Target 90463; HLA-A*68:01; TRPM1; ENSG00000134160; TAA
SADGYSLYR

SEQ ID NO: 90464 - protein, 9 aa, Homo sapiens
  Table A; Target 90464; HLA-C*07:06; TRPM1; ENSG00000134160; TAA
SADGYSLYR

SEQ ID NO: 90465 - protein, 10 aa, Homo sapiens
  Table A; Target 90465; HLA-A*01:01; TRPM1; ENSG00000134160; TAA
SADGYSLYRY

SEQ ID NO: 90466 - protein, 10 aa, Homo sapiens
  Table A; Target 90466; HLA-A*29:02; TRPM1; ENSG00000134160; TAA
SADGYSLYRY

SEQ ID NO: 90467 - protein, 10 aa, Homo sapiens
  Table A; Target 90467; HLA-A*30:02; TRPM1; ENSG00000134160; TAA
SADGYSLYRY

SEQ ID NO: 90468 - protein, 8 aa, Homo sapiens
  Table A; Target 90468; HLA-B*51:01; TRPM1; ENSG00000134160; TAA
SAPDQLSL

SEQ ID NO: 90469 - protein, 8 aa, Homo sapiens
  Table A; Target 90469; HLA-C*01:02; TRPM1; ENSG00000134160; TAA
SAPDQLSL

SEQ ID NO: 90470 - protein, 10 aa, Homo sapiens
  Table A; Target 90470; HLA-C*01:02; TRPM1; ENSG00000134160; TAA
SAPDQLSLAL

SEQ ID NO: 90471 - protein, 9 aa, Homo sapiens
  Table A; Target 90471; HLA-B*35:03; TRPM1; ENSG00000134160; TAA
SATPDGSHL

SEQ ID NO: 90472 - protein, 9 aa, Homo sapiens
  Table A; Target 90472; HLA-C*03:03; TRPM1; ENSG00000134160; TAA
SATPDGSHL

SEQ ID NO: 90473 - protein, 9 aa, Homo sapiens
  Table A; Target 90473; HLA-C*03:04; TRPM1; ENSG00000134160; TAA
SATPDGSHL

SEQ ID NO: 90474 - protein, 9 aa, Homo sapiens
  Table A; Target 90474; HLA-C*16:02; TRPM1; ENSG00000134160; TAA
SATPDGSHL

SEQ ID NO: 90475 - protein, 10 aa, Homo sapiens
  Table A; Target 90475; HLA-B*44:02; TRPM1; ENSG00000134160; TAA
SDILSFAHKY

SEQ ID NO: 90476 - protein, 10 aa, Homo sapiens
  Table A; Target 90476; HLA-B*44:03; TRPM1; ENSG00000134160; TAA
SDILSFAHKY

SEQ ID NO: 90477 - protein, 8 aa, Homo sapiens
  Table A; Target 90477; HLA-A*30:01; TRPM1; ENSG00000134160; TAA
SDVQNTQL

SEQ ID NO: 90478 - protein, 8 aa, Homo sapiens
  Table A; Target 90478; HLA-B*37:01; TRPM1; ENSG00000134160; TAA
SDVQNTQL

SEQ ID NO: 90479 - protein, 9 aa, Homo sapiens
  Table A; Target 90479; HLA-B*18:01; TRPM1; ENSG00000134160; TAA
SEAAVQAEH

SEQ ID NO: 90480 - protein, 9 aa, Homo sapiens
  Table A; Target 90480; HLA-B*40:01; TRPM1; ENSG00000134160; TAA
SEAAVQAEH

SEQ ID NO: 90481 - protein, 9 aa, Homo sapiens
  Table A; Target 90481; HLA-B*44:03; TRPM1; ENSG00000134160; TAA
SEAAVQAEH

SEQ ID NO: 90482 - protein, 9 aa, Homo sapiens
  Table A; Target 90482; HLA-C*02:02; TRPM1; ENSG00000134160; TAA
SEAAVQAEH

SEQ ID NO: 90483 - protein, 9 aa, Homo sapiens
  Table A; Target 90483; HLA-C*16:04; TRPM1; ENSG00000134160; TAA
SEAAVQAEH

SEQ ID NO: 90484 - protein, 8 aa, Homo sapiens
  Table A; Target 90484; HLA-B*18:01; TRPM1; ENSG00000134160; TAA
SECEATYL

SEQ ID NO: 90485 - protein, 8 aa, Homo sapiens
  Table A; Target 90485; HLA-B*37:01; TRPM1; ENSG00000134160; TAA
SECEATYL

SEQ ID NO: 90486 - protein, 9 aa, Homo sapiens
  Table A; Target 90486; HLA-A*30:01; TRPM1; ENSG00000134160; TAA
SECEATYLL

SEQ ID NO: 90487 - protein, 9 aa, Homo sapiens
  Table A; Target 90487; HLA-B*37:01; TRPM1; ENSG00000134160; TAA
SECEATYLL

SEQ ID NO: 90488 - protein, 9 aa, Homo sapiens
  Table A; Target 90488; HLA-B*38:01; TRPM1; ENSG00000134160; TAA
SECEATYLL

SEQ ID NO: 90489 - protein, 9 aa, Homo sapiens
  Table A; Target 90489; HLA-B*40:01; TRPM1; ENSG00000134160; TAA
SECEATYLL

SEQ ID NO: 90490 - protein, 9 aa, Homo sapiens
  Table A; Target 90490; HLA-B*40:02; TRPM1; ENSG00000134160; TAA
SECEATYLL

SEQ ID NO: 90491 - protein, 9 aa, Homo sapiens
  Table A; Target 90491; HLA-B*44:02; TRPM1; ENSG00000134160; TAA
SECEATYLL

SEQ ID NO: 90492 - protein, 9 aa, Homo sapiens
  Table A; Target 90492; HLA-B*44:03; TRPM1; ENSG00000134160; TAA
SECEATYLL

SEQ ID NO: 90493 - protein, 9 aa, Homo sapiens
  Table A; Target 90493; HLA-B*49:01; TRPM1; ENSG00000134160; TAA
SECEATYLL

SEQ ID NO: 90494 - protein, 9 aa, Homo sapiens
  Table A; Target 90494; HLA-A*30:01; TRPM1; ENSG00000134160; TAA
SEGQQDIEM

SEQ ID NO: 90495 - protein, 9 aa, Homo sapiens
  Table A; Target 90495; HLA-B*40:01; TRPM1; ENSG00000134160; TAA
SEGQQDIEM

SEQ ID NO: 90496 - protein, 9 aa, Homo sapiens
  Table A; Target 90496; HLA-B*44:02; TRPM1; ENSG00000134160; TAA
SEGQQDIEM

SEQ ID NO: 90497 - protein, 9 aa, Homo sapiens
  Table A; Target 90497; HLA-B*44:03; TRPM1; ENSG00000134160; TAA
SEGQQDIEM

SEQ ID NO: 90498 - protein, 9 aa, Homo sapiens
  Table A; Target 90498; HLA-A*30:01; TRPM1; ENSG00000134160; TAA
SERVENMSM

SEQ ID NO: 90499 - protein, 9 aa, Homo sapiens
  Table A; Target 90499; HLA-B*37:01; TRPM1; ENSG00000134160; TAA
SERVENMSM

SEQ ID NO: 90500 - protein, 9 aa, Homo sapiens
  Table A; Target 90500; HLA-B*40:01; TRPM1; ENSG00000134160; TAA
SERVENMSM

SEQ ID NO: 90501 - protein, 9 aa, Homo sapiens
  Table A; Target 90501; HLA-B*40:02; TRPM1; ENSG00000134160; TAA
SERVENMSM

SEQ ID NO: 90502 - protein, 9 aa, Homo sapiens
  Table A; Target 90502; HLA-B*49:01; TRPM1; ENSG00000134160; TAA
SERVENMSM

SEQ ID NO: 90503 - protein, 9 aa, Homo sapiens
  Table A; Target 90503; HLA-A*30:01; TRPM1; ENSG00000134160; TAA
SESDLVDDI

SEQ ID NO: 90504 - protein, 9 aa, Homo sapiens
  Table A; Target 90504; HLA-B*40:01; TRPM1; ENSG00000134160; TAA
SESDLVDDI

SEQ ID NO: 90505 - protein, 9 aa, Homo sapiens
  Table A; Target 90505; HLA-B*44:02; TRPM1; ENSG00000134160; TAA
SESDLVDDI

SEQ ID NO: 90506 - protein, 9 aa, Homo sapiens
  Table A; Target 90506; HLA-B*44:03; TRPM1; ENSG00000134160; TAA
SESDLVDDI

SEQ ID NO: 90507 - protein, 9 aa, Homo sapiens
  Table A; Target 90507; HLA-B*49:01; TRPM1; ENSG00000134160; TAA
SESDLVDDI

SEQ ID NO: 90508 - protein, 9 aa, Homo sapiens
  Table A; Target 90508; HLA-B*27:05; TRPM1; ENSG00000134160; TAA
SHSTDIPYI

SEQ ID NO: 90509 - protein, 9 aa, Homo sapiens
  Table A; Target 90509; HLA-B*38:01; TRPM1; ENSG00000134160; TAA
SHSTDIPYI

SEQ ID NO: 90510 - protein, 9 aa, Homo sapiens
  Table A; Target 90510; HLA-B*39:01; TRPM1; ENSG00000134160; TAA
SHSTDIPYI

SEQ ID NO: 90511 - protein, 10 aa, Homo sapiens
  Table A; Target 90511; HLA-B*38:01; TRPM1; ENSG00000134160; TAA
SHSTDIPYIV

SEQ ID NO: 90512 - protein, 8 aa, Homo sapiens
  Table A; Target 90512; HLA-A*30:02; TRPM1; ENSG00000134160; TAA
SINSADGY

SEQ ID NO: 90513 - protein, 8 aa, Homo sapiens
  Table A; Target 90513; HLA-B*39:01; TRPM1; ENSG00000134160; TAA
SINSADGY

SEQ ID NO: 90514 - protein, 10 aa, Homo sapiens
  Table A; Target 90514; HLA-B*07:02; TRPM1; ENSG00000134160; TAA
SINSADGYSL

SEQ ID NO: 90515 - protein, 10 aa, Homo sapiens
  Table A; Target 90515; HLA-B*38:01; TRPM1; ENSG00000134160; TAA
SINSADGYSL

SEQ ID NO: 90516 - protein, 10 aa, Homo sapiens
  Table A; Target 90516; HLA-B*40:01; TRPM1; ENSG00000134160; TAA
SINSADGYSL

SEQ ID NO: 90517 - protein, 10 aa, Homo sapiens
  Table A; Target 90517; HLA-C*01:02; TRPM1; ENSG00000134160; TAA
SINSADGYSL

SEQ ID NO: 90518 - protein, 11 aa, Homo sapiens
  Table A; Target 90518; HLA-A*01:01; TRPM1; ENSG00000134160; TAA
SINSADGYSLY

SEQ ID NO: 90519 - protein, 11 aa, Homo sapiens
  Table A; Target 90519; HLA-A*25:01; TRPM1; ENSG00000134160; TAA
SINSADGYSLY

SEQ ID NO: 90520 - protein, 11 aa, Homo sapiens
  Table A; Target 90520; HLA-A*26:01; TRPM1; ENSG00000134160; TAA
SINSADGYSLY

SEQ ID NO: 90521 - protein, 11 aa, Homo sapiens
  Table A; Target 90521; HLA-A*29:02; TRPM1; ENSG00000134160; TAA
SINSADGYSLY

SEQ ID NO: 90522 - protein, 11 aa, Homo sapiens
  Table A; Target 90522; HLA-A*30:02; TRPM1; ENSG00000134160; TAA
SINSADGYSLY

SEQ ID NO: 90523 - protein, 11 aa, Homo sapiens
  Table A; Target 90523; HLA-B*15:01; TRPM1; ENSG00000134160; TAA
SINSADGYSLY

SEQ ID NO: 90524 - protein, 11 aa, Homo sapiens
  Table A; Target 90524; HLA-B*15:03; TRPM1; ENSG00000134160; TAA
SINSADGYSLY

SEQ ID NO: 90525 - protein, 9 aa, Homo sapiens
  Table A; Target 90525; HLA-A*02:04; TRPM1; ENSG00000134160; TAA
SISNQVWKF

SEQ ID NO: 90526 - protein, 9 aa, Homo sapiens
  Table A; Target 90526; HLA-A*24:02; TRPM1; ENSG00000134160; TAA
SISNQVWKF

SEQ ID NO: 90527 - protein, 11 aa, Homo sapiens
  Table A; Target 90527; HLA-A*25:01; TRPM1; ENSG00000134160; TAA
SITDQQLTTEW

SEQ ID NO: 90528 - protein, 11 aa, Homo sapiens
  Table A; Target 90528; HLA-A*32:01; TRPM1; ENSG00000134160; TAA
SITDQQLTTEW

SEQ ID NO: 90529 - protein, 11 aa, Homo sapiens
  Table A; Target 90529; HLA-B*57:01; TRPM1; ENSG00000134160; TAA
SITDQQLTTEW

SEQ ID NO: 90530 - protein, 11 aa, Homo sapiens
  Table A; Target 90530; HLA-B*58:01; TRPM1; ENSG00000134160; TAA
SITDQQLTTEW

SEQ ID NO: 90531 - protein, 9 aa, Homo sapiens
  Table A; Target 90531; HLA-A*03:01; TRPM1; ENSG00000134160; TAA
SLAPPTDSK

SEQ ID NO: 90532 - protein, 9 aa, Homo sapiens
  Table A; Target 90532; HLA-A*03:02; TRPM1; ENSG00000134160; TAA
SLAPPTDSK

SEQ ID NO: 90533 - protein, 9 aa, Homo sapiens
  Table A; Target 90533; HLA-A*11:01; TRPM1; ENSG00000134160; TAA
SLAPPTDSK

SEQ ID NO: 90534 - protein, 9 aa, Homo sapiens
  Table A; Target 90534; HLA-B*13:02; TRPM1; ENSG00000134160; TAA
SLAPPTDSK

SEQ ID NO: 90535 - protein, 9 aa, Homo sapiens
  Table A; Target 90535; HLA-C*07:06; TRPM1; ENSG00000134160; TAA
SLAPPTDSK

SEQ ID NO: 90536 - protein, 9 aa, Homo sapiens
  Table A; Target 90536; HLA-A*02:01; TRPM1; ENSG00000134160; TAA
SLHGHPRNV

SEQ ID NO: 90537 - protein, 9 aa, Homo sapiens
  Table A; Target 90537; HLA-A*02:03; TRPM1; ENSG00000134160; TAA
SLHGHPRNV

SEQ ID NO: 90538 - protein, 9 aa, Homo sapiens
  Table A; Target 90538; HLA-A*02:01; TRPM1; ENSG00000134160; TAA
SLIDIGLVL

SEQ ID NO: 90539 - protein, 9 aa, Homo sapiens
  Table A; Target 90539; HLA-A*02:03; TRPM1; ENSG00000134160; TAA
SLIDIGLVL

SEQ ID NO: 90540 - protein, 9 aa, Homo sapiens
  Table A; Target 90540; HLA-A*02:04; TRPM1; ENSG00000134160; TAA
SLIDIGLVL

SEQ ID NO: 90541 - protein, 9 aa, Homo sapiens
  Table A; Target 90541; HLA-A*02:07; TRPM1; ENSG00000134160; TAA
SLIDIGLVL

SEQ ID NO: 90542 - protein, 9 aa, Homo sapiens
  Table A; Target 90542; HLA-A*23:01; TRPM1; ENSG00000134160; TAA
SLIDIGLVL

SEQ ID NO: 90543 - protein, 9 aa, Homo sapiens
  Table A; Target 90543; HLA-C*03:04; TRPM1; ENSG00000134160; TAA
SLIDIGLVL

SEQ ID NO: 90544 - protein, 11 aa, Homo sapiens
  Table A; Target 90544; HLA-A*26:01; TRPM1; ENSG00000134160; TAA
SLIDIGLVLEY

SEQ ID NO: 90545 - protein, 11 aa, Homo sapiens
  Table A; Target 90545; HLA-A*29:02; TRPM1; ENSG00000134160; TAA
SLIDIGLVLEY

SEQ ID NO: 90546 - protein, 11 aa, Homo sapiens
  Table A; Target 90546; HLA-A*30:02; TRPM1; ENSG00000134160; TAA
SLIDIGLVLEY

SEQ ID NO: 90547 - protein, 9 aa, Homo sapiens
  Table A; Target 90547; HLA-A*02:01; TRPM1; ENSG00000134160; TAA
SLQKINTRL

SEQ ID NO: 90548 - protein, 9 aa, Homo sapiens
  Table A; Target 90548; HLA-A*02:03; TRPM1; ENSG00000134160; TAA
SLQKINTRL

SEQ ID NO: 90549 - protein, 9 aa, Homo sapiens
  Table A; Target 90549; HLA-A*02:04; TRPM1; ENSG00000134160; TAA
SLQKINTRL

SEQ ID NO: 90550 - protein, 9 aa, Homo sapiens
  Table A; Target 90550; HLA-A*02:01; TRPM1; ENSG00000134160; TAA
SLQTVDLRL

SEQ ID NO: 90551 - protein, 9 aa, Homo sapiens
  Table A; Target 90551; HLA-A*02:04; TRPM1; ENSG00000134160; TAA
SLQTVDLRL

SEQ ID NO: 90552 - protein, 9 aa, Homo sapiens
  Table A; Target 90552; HLA-A*02:07; TRPM1; ENSG00000134160; TAA
SLQTVDLRL

SEQ ID NO: 90553 - protein, 9 aa, Homo sapiens
  Table A; Target 90553; HLA-A*23:01; TRPM1; ENSG00000134160; TAA
SLQTVDLRL

SEQ ID NO: 90554 - protein, 9 aa, Homo sapiens
  Table A; Target 90554; HLA-B*13:02; TRPM1; ENSG00000134160; TAA
SLQTVDLRL

SEQ ID NO: 90555 - protein, 10 aa, Homo sapiens
  Table A; Target 90555; HLA-A*02:03; TRPM1; ENSG00000134160; TAA
SLQTVDLRLA

SEQ ID NO: 90556 - protein, 10 aa, Homo sapiens
  Table A; Target 90556; HLA-A*02:03; TRPM1; ENSG00000134160; TAA
SLREQLLVTI

SEQ ID NO: 90557 - protein, 10 aa, Homo sapiens
  Table A; Target 90557; HLA-A*02:04; TRPM1; ENSG00000134160; TAA
SLREQLLVTI

SEQ ID NO: 90558 - protein, 10 aa, Homo sapiens
  Table A; Target 90558; HLA-A*02:01; TRPM1; ENSG00000134160; TAA
SLSTSPGTGV

SEQ ID NO: 90559 - protein, 10 aa, Homo sapiens
  Table A; Target 90559; HLA-A*02:03; TRPM1; ENSG00000134160; TAA
SLSTSPGTGV

SEQ ID NO: 90560 - protein, 8 aa, Homo sapiens
  Table A; Target 90560; HLA-B*37:01; TRPM1; ENSG00000134160; TAA
SLVIVSGM

SEQ ID NO: 90561 - protein, 9 aa, Homo sapiens
  Table A; Target 90561; HLA-A*02:01; TRPM1; ENSG00000134160; TAA
SMAKALVAC

SEQ ID NO: 90562 - protein, 10 aa, Homo sapiens
  Table A; Target 90562; HLA-A*03:02; TRPM1; ENSG00000134160; TAA
SMAKALVACK

SEQ ID NO: 90563 - protein, 8 aa, Homo sapiens
  Table A; Target 90563; HLA-B*08:01; TRPM1; ENSG00000134160; TAA
SNRMVNAL

SEQ ID NO: 90564 - protein, 9 aa, Homo sapiens
  Table A; Target 90564; HLA-B*07:02; TRPM1; ENSG00000134160; TAA
SPSLNKTDV

SEQ ID NO: 90565 - protein, 10 aa, Homo sapiens
  Table A; Target 90565; HLA-B*07:02; TRPM1; ENSG00000134160; TAA
SPSLNKTDVI

SEQ ID NO: 90566 - protein, 8 aa, Homo sapiens
  Table A; Target 90566; HLA-B*15:01; TRPM1; ENSG00000134160; TAA
SQMLLTDM

SEQ ID NO: 90567 - protein, 8 aa, Homo sapiens
  Table A; Target 90567; HLA-B*15:03; TRPM1; ENSG00000134160; TAA
SQMLLTDM

SEQ ID NO: 90568 - protein, 9 aa, Homo sapiens
  Table A; Target 90568; HLA-B*44:02; TRPM1; ENSG00000134160; TAA
SQMLLTDMW

SEQ ID NO: 90569 - protein, 9 aa, Homo sapiens
  Table A; Target 90569; HLA-C*16:04; TRPM1; ENSG00000134160; TAA
SQMLLTDMW

SEQ ID NO: 90570 - protein, 11 aa, Homo sapiens
  Table A; Target 90570; HLA-C*16:04; TRPM1; ENSG00000134160; TAA
SRASSECEATY

SEQ ID NO: 90571 - protein, 8 aa, Homo sapiens
  Table A; Target 90571; HLA-C*05:01; TRPM1; ENSG00000134160; TAA
SSDERIRV

SEQ ID NO: 90572 - protein, 9 aa, Homo sapiens
  Table A; Target 90572; HLA-C*05:01; TRPM1; ENSG00000134160; TAA
SSECEATYL

SEQ ID NO: 90573 - protein, 9 aa, Homo sapiens
  Table A; Target 90573; HLA-A*01:01; TRPM1; ENSG00000134160; TAA
SSINSADGY

SEQ ID NO: 90574 - protein, 9 aa, Homo sapiens
  Table A; Target 90574; HLA-A*26:01; TRPM1; ENSG00000134160; TAA
SSINSADGY

SEQ ID NO: 90575 - protein, 9 aa, Homo sapiens
  Table A; Target 90575; HLA-A*29:02; TRPM1; ENSG00000134160; TAA
SSINSADGY

SEQ ID NO: 90576 - protein, 9 aa, Homo sapiens
  Table A; Target 90576; HLA-A*30:02; TRPM1; ENSG00000134160; TAA
SSINSADGY

SEQ ID NO: 90577 - protein, 9 aa, Homo sapiens
  Table A; Target 90577; HLA-A*32:01; TRPM1; ENSG00000134160; TAA
SSINSADGY

SEQ ID NO: 90578 - protein, 9 aa, Homo sapiens
  Table A; Target 90578; HLA-B*15:01; TRPM1; ENSG00000134160; TAA
SSINSADGY

SEQ ID NO: 90579 - protein, 9 aa, Homo sapiens
  Table A; Target 90579; HLA-B*15:03; TRPM1; ENSG00000134160; TAA
SSINSADGY

SEQ ID NO: 90580 - protein, 9 aa, Homo sapiens
  Table A; Target 90580; HLA-B*27:02; TRPM1; ENSG00000134160; TAA
SSINSADGY

SEQ ID NO: 90581 - protein, 9 aa, Homo sapiens
  Table A; Target 90581; HLA-B*58:01; TRPM1; ENSG00000134160; TAA
SSINSADGY

SEQ ID NO: 90582 - protein, 9 aa, Homo sapiens
  Table A; Target 90582; HLA-C*16:04; TRPM1; ENSG00000134160; TAA
SSINSADGY

SEQ ID NO: 90583 - protein, 8 aa, Homo sapiens
  Table A; Target 90583; HLA-C*05:01; TRPM1; ENSG00000134160; TAA
STDIPYIV

SEQ ID NO: 90584 - protein, 9 aa, Homo sapiens
  Table A; Target 90584; HLA-A*68:02; TRPM1; ENSG00000134160; TAA
STFMIGAIL

SEQ ID NO: 90585 - protein, 10 aa, Homo sapiens
  Table A; Target 90585; HLA-A*31:01; TRPM1; ENSG00000134160; TAA
STFMIGAILR

SEQ ID NO: 90586 - protein, 10 aa, Homo sapiens
  Table A; Target 90586; HLA-A*68:01; TRPM1; ENSG00000134160; TAA
STFMIGAILR

SEQ ID NO: 90587 - protein, 10 aa, Homo sapiens
  Table A; Target 90587; HLA-A*68:02; TRPM1; ENSG00000134160; TAA
STFMIGAILR

SEQ ID NO: 90588 - protein, 11 aa, Homo sapiens
  Table A; Target 90588; HLA-A*02:04; TRPM1; ENSG00000134160; TAA
STFMIGAILRL

SEQ ID NO: 90589 - protein, 11 aa, Homo sapiens
  Table A; Target 90589; HLA-A*68:02; TRPM1; ENSG00000134160; TAA
STFMIGAILRL

SEQ ID NO: 90590 - protein, 9 aa, Homo sapiens
  Table A; Target 90590; HLA-A*11:01; TRPM1; ENSG00000134160; TAA
STSPGTGVR

SEQ ID NO: 90591 - protein, 9 aa, Homo sapiens
  Table A; Target 90591; HLA-A*33:03; TRPM1; ENSG00000134160; TAA
STSPGTGVR

SEQ ID NO: 90592 - protein, 9 aa, Homo sapiens
  Table A; Target 90592; HLA-A*68:01; TRPM1; ENSG00000134160; TAA
STSPGTGVR

SEQ ID NO: 90593 - protein, 9 aa, Homo sapiens
  Table A; Target 90593; HLA-C*07:06; TRPM1; ENSG00000134160; TAA
STSPGTGVR

SEQ ID NO: 90594 - protein, 10 aa, Homo sapiens
  Table A; Target 90594; HLA-A*01:01; TRPM1; ENSG00000134160; TAA
STSPGTGVRK

SEQ ID NO: 90595 - protein, 10 aa, Homo sapiens
  Table A; Target 90595; HLA-A*03:01; TRPM1; ENSG00000134160; TAA
STSPGTGVRK

SEQ ID NO: 90596 - protein, 10 aa, Homo sapiens
  Table A; Target 90596; HLA-A*03:02; TRPM1; ENSG00000134160; TAA
STSPGTGVRK

SEQ ID NO: 90597 - protein, 10 aa, Homo sapiens
  Table A; Target 90597; HLA-A*11:01; TRPM1; ENSG00000134160; TAA
STSPGTGVRK

SEQ ID NO: 90598 - protein, 10 aa, Homo sapiens
  Table A; Target 90598; HLA-A*68:01; TRPM1; ENSG00000134160; TAA
STSPGTGVRK

SEQ ID NO: 90599 - protein, 10 aa, Homo sapiens
  Table A; Target 90599; HLA-C*07:06; TRPM1; ENSG00000134160; TAA
STSPGTGVRK

SEQ ID NO: 90600 - protein, 11 aa, Homo sapiens
  Table A; Target 90600; HLA-A*03:01; TRPM1; ENSG00000134160; TAA
STSPGTGVRKK

SEQ ID NO: 90601 - protein, 11 aa, Homo sapiens
  Table A; Target 90601; HLA-A*03:02; TRPM1; ENSG00000134160; TAA
STSPGTGVRKK

SEQ ID NO: 90602 - protein, 11 aa, Homo sapiens
  Table A; Target 90602; HLA-A*11:01; TRPM1; ENSG00000134160; TAA
STSPGTGVRKK

SEQ ID NO: 90603 - protein, 11 aa, Homo sapiens
  Table A; Target 90603; HLA-A*68:01; TRPM1; ENSG00000134160; TAA
STSPGTGVRKK

SEQ ID NO: 90604 - protein, 9 aa, Homo sapiens
  Table A; Target 90604; HLA-A*01:01; TRPM1; ENSG00000134160; TAA
SVAKHTQSY

SEQ ID NO: 90605 - protein, 9 aa, Homo sapiens
  Table A; Target 90605; HLA-A*03:01; TRPM1; ENSG00000134160; TAA
SVAKHTQSY

SEQ ID NO: 90606 - protein, 9 aa, Homo sapiens
  Table A; Target 90606; HLA-A*25:01; TRPM1; ENSG00000134160; TAA
SVAKHTQSY

SEQ ID NO: 90607 - protein, 9 aa, Homo sapiens
  Table A; Target 90607; HLA-A*26:01; TRPM1; ENSG00000134160; TAA
SVAKHTQSY

SEQ ID NO: 90608 - protein, 9 aa, Homo sapiens
  Table A; Target 90608; HLA-A*29:02; TRPM1; ENSG00000134160; TAA
SVAKHTQSY

SEQ ID NO: 90609 - protein, 9 aa, Homo sapiens
  Table A; Target 90609; HLA-A*30:02; TRPM1; ENSG00000134160; TAA
SVAKHTQSY

SEQ ID NO: 90610 - protein, 9 aa, Homo sapiens
  Table A; Target 90610; HLA-A*32:01; TRPM1; ENSG00000134160; TAA
SVAKHTQSY

SEQ ID NO: 90611 - protein, 9 aa, Homo sapiens
  Table A; Target 90611; HLA-B*15:01; TRPM1; ENSG00000134160; TAA
SVAKHTQSY

SEQ ID NO: 90612 - protein, 9 aa, Homo sapiens
  Table A; Target 90612; HLA-B*15:03; TRPM1; ENSG00000134160; TAA
SVAKHTQSY

SEQ ID NO: 90613 - protein, 9 aa, Homo sapiens
  Table A; Target 90613; HLA-B*35:01; TRPM1; ENSG00000134160; TAA
SVAKHTQSY

SEQ ID NO: 90614 - protein, 9 aa, Homo sapiens
  Table A; Target 90614; HLA-B*44:03; TRPM1; ENSG00000134160; TAA
SVAKHTQSY

SEQ ID NO: 90615 - protein, 9 aa, Homo sapiens
  Table A; Target 90615; HLA-B*46:01; TRPM1; ENSG00000134160; TAA
SVAKHTQSY

SEQ ID NO: 90616 - protein, 9 aa, Homo sapiens
  Table A; Target 90616; HLA-B*58:01; TRPM1; ENSG00000134160; TAA
SVAKHTQSY

SEQ ID NO: 90617 - protein, 9 aa, Homo sapiens
  Table A; Target 90617; HLA-C*02:02; TRPM1; ENSG00000134160; TAA
SVAKHTQSY

SEQ ID NO: 90618 - protein, 9 aa, Homo sapiens
  Table A; Target 90618; HLA-C*07:04; TRPM1; ENSG00000134160; TAA
SVAKHTQSY

SEQ ID NO: 90619 - protein, 9 aa, Homo sapiens
  Table A; Target 90619; HLA-C*07:06; TRPM1; ENSG00000134160; TAA
SVAKHTQSY

SEQ ID NO: 90620 - protein, 9 aa, Homo sapiens
  Table A; Target 90620; HLA-C*16:01; TRPM1; ENSG00000134160; TAA
SVAKHTQSY

SEQ ID NO: 90621 - protein, 9 aa, Homo sapiens
  Table A; Target 90621; HLA-A*25:01; TRPM1; ENSG00000134160; TAA
SVHGGLQNF

SEQ ID NO: 90622 - protein, 9 aa, Homo sapiens
  Table A; Target 90622; HLA-A*26:01; TRPM1; ENSG00000134160; TAA
SVHGGLQNF

SEQ ID NO: 90623 - protein, 9 aa, Homo sapiens
  Table A; Target 90623; HLA-A*30:02; TRPM1; ENSG00000134160; TAA
SVHGGLQNF

SEQ ID NO: 90624 - protein, 9 aa, Homo sapiens
  Table A; Target 90624; HLA-A*32:01; TRPM1; ENSG00000134160; TAA
SVHGGLQNF

SEQ ID NO: 90625 - protein, 9 aa, Homo sapiens
  Table A; Target 90625; HLA-B*15:01; TRPM1; ENSG00000134160; TAA
SVHGGLQNF

SEQ ID NO: 90626 - protein, 9 aa, Homo sapiens
  Table A; Target 90626; HLA-B*46:01; TRPM1; ENSG00000134160; TAA
SVHGGLQNF

SEQ ID NO: 90627 - protein, 10 aa, Homo sapiens
  Table A; Target 90627; HLA-A*25:01; TRPM1; ENSG00000134160; TAA
SVKPDQTLGF

SEQ ID NO: 90628 - protein, 10 aa, Homo sapiens
  Table A; Target 90628; HLA-A*26:01; TRPM1; ENSG00000134160; TAA
SVKPDQTLGF

SEQ ID NO: 90629 - protein, 10 aa, Homo sapiens
  Table A; Target 90629; HLA-A*30:02; TRPM1; ENSG00000134160; TAA
SVKPDQTLGF

SEQ ID NO: 90630 - protein, 10 aa, Homo sapiens
  Table A; Target 90630; HLA-A*31:01; TRPM1; ENSG00000134160; TAA
SVKPDQTLGF

SEQ ID NO: 90631 - protein, 10 aa, Homo sapiens
  Table A; Target 90631; HLA-A*32:01; TRPM1; ENSG00000134160; TAA
SVKPDQTLGF

SEQ ID NO: 90632 - protein, 10 aa, Homo sapiens
  Table A; Target 90632; HLA-B*15:01; TRPM1; ENSG00000134160; TAA
SVKPDQTLGF

SEQ ID NO: 90633 - protein, 10 aa, Homo sapiens
  Table A; Target 90633; HLA-B*57:01; TRPM1; ENSG00000134160; TAA
SVKPDQTLGF

SEQ ID NO: 90634 - protein, 10 aa, Homo sapiens
  Table A; Target 90634; HLA-B*57:01; TRPM1; ENSG00000134160; TAA
SVLNNSHTHF

SEQ ID NO: 90635 - protein, 9 aa, Homo sapiens
  Table A; Target 90635; HLA-A*11:01; TRPM1; ENSG00000134160; TAA
SVSSLVIVS

SEQ ID NO: 90636 - protein, 10 aa, Homo sapiens
  Table A; Target 90636; HLA-C*07:06; TRPM1; ENSG00000134160; TAA
SVSSLVIVSG

SEQ ID NO: 90637 - protein, 11 aa, Homo sapiens
  Table A; Target 90637; HLA-A*26:01; TRPM1; ENSG00000134160; TAA
SVSSLVIVSGM

SEQ ID NO: 90638 - protein, 9 aa, Homo sapiens
  Table A; Target 90638; HLA-A*24:02; TRPM1; ENSG00000134160; TAA
SYDTKPDSL

SEQ ID NO: 90639 - protein, 9 aa, Homo sapiens
  Table A; Target 90639; HLA-A*32:01; TRPM1; ENSG00000134160; TAA
SYDTKPDSL

SEQ ID NO: 90640 - protein, 9 aa, Homo sapiens
  Table A; Target 90640; HLA-B*35:03; TRPM1; ENSG00000134160; TAA
SYDTKPDSL

SEQ ID NO: 90641 - protein, 9 aa, Homo sapiens
  Table A; Target 90641; HLA-C*04:01; TRPM1; ENSG00000134160; TAA
SYDTKPDSL

SEQ ID NO: 90642 - protein, 9 aa, Homo sapiens
  Table A; Target 90642; HLA-C*05:01; TRPM1; ENSG00000134160; TAA
SYDTKPDSL

SEQ ID NO: 90643 - protein, 9 aa, Homo sapiens
  Table A; Target 90643; HLA-C*14:02; TRPM1; ENSG00000134160; TAA
SYDTKPDSL

SEQ ID NO: 90644 - protein, 10 aa, Homo sapiens
  Table A; Target 90644; HLA-C*04:01; TRPM1; ENSG00000134160; TAA
SYDTKPDSLL

SEQ ID NO: 90645 - protein, 8 aa, Homo sapiens
  Table A; Target 90645; HLA-A*23:01; TRPM1; ENSG00000134160; TAA
SYIVSLAL

SEQ ID NO: 90646 - protein, 8 aa, Homo sapiens
  Table A; Target 90646; HLA-C*14:02; TRPM1; ENSG00000134160; TAA
SYIVSLAL

SEQ ID NO: 90647 - protein, 9 aa, Homo sapiens
  Table A; Target 90647; HLA-A*23:01; TRPM1; ENSG00000134160; TAA
SYLGYLLLF

SEQ ID NO: 90648 - protein, 9 aa, Homo sapiens
  Table A; Target 90648; HLA-A*24:02; TRPM1; ENSG00000134160; TAA
SYLGYLLLF

SEQ ID NO: 90649 - protein, 9 aa, Homo sapiens
  Table A; Target 90649; HLA-A*29:02; TRPM1; ENSG00000134160; TAA
SYLGYLLLF

SEQ ID NO: 90650 - protein, 11 aa, Homo sapiens
  Table A; Target 90650; HLA-A*29:02; TRPM1; ENSG00000134160; TAA
SYLGYLLLFNY

SEQ ID NO: 90651 - protein, 9 aa, Homo sapiens
  Table A; Target 90651; HLA-A*23:01; TRPM1; ENSG00000134160; TAA
SYPLEETKI

SEQ ID NO: 90652 - protein, 9 aa, Homo sapiens
  Table A; Target 90652; HLA-A*24:02; TRPM1; ENSG00000134160; TAA
SYPLEETKI

SEQ ID NO: 90653 - protein, 9 aa, Homo sapiens
  Table A; Target 90653; HLA-C*01:02; TRPM1; ENSG00000134160; TAA
SYPLEETKI

SEQ ID NO: 90654 - protein, 9 aa, Homo sapiens
  Table A; Target 90654; HLA-B*08:01; TRPM1; ENSG00000134160; TAA
TALLKGTNV

SEQ ID NO: 90655 - protein, 9 aa, Homo sapiens
  Table A; Target 90655; HLA-B*51:01; TRPM1; ENSG00000134160; TAA
TALLKGTNV

SEQ ID NO: 90656 - protein, 11 aa, Homo sapiens
  Table A; Target 90656; HLA-B*54:01; TRPM1; ENSG00000134160; TAA
TALLKGTNVSA

SEQ ID NO: 90657 - protein, 9 aa, Homo sapiens
  Table A; Target 90657; HLA-B*54:01; TRPM1; ENSG00000134160; TAA
TCLKLAVAA

SEQ ID NO: 90658 - protein, 9 aa, Homo sapiens
  Table A; Target 90658; HLA-B*18:01; TRPM1; ENSG00000134160; TAA
TDLVAISTF

SEQ ID NO: 90659 - protein, 9 aa, Homo sapiens
  Table A; Target 90659; HLA-B*37:01; TRPM1; ENSG00000134160; TAA
TDLVAISTF

SEQ ID NO: 90660 - protein, 9 aa, Homo sapiens
  Table A; Target 90660; HLA-B*44:02; TRPM1; ENSG00000134160; TAA
TDLVAISTF

SEQ ID NO: 90661 - protein, 9 aa, Homo sapiens
  Table A; Target 90661; HLA-B*44:03; TRPM1; ENSG00000134160; TAA
TDLVAISTF

SEQ ID NO: 90662 - protein, 9 aa, Homo sapiens
  Table A; Target 90662; HLA-C*04:01; TRPM1; ENSG00000134160; TAA
TDLVAISTF

SEQ ID NO: 90663 - protein, 9 aa, Homo sapiens
  Table A; Target 90663; HLA-B*27:02; TRPM1; ENSG00000134160; TAA
TDQQLTTEW

SEQ ID NO: 90664 - protein, 9 aa, Homo sapiens
  Table A; Target 90664; HLA-B*44:02; TRPM1; ENSG00000134160; TAA
TDQQLTTEW

SEQ ID NO: 90665 - protein, 9 aa, Homo sapiens
  Table A; Target 90665; HLA-B*44:03; TRPM1; ENSG00000134160; TAA
TDQQLTTEW

SEQ ID NO: 90666 - protein, 9 aa, Homo sapiens
  Table A; Target 90666; HLA-C*16:04; TRPM1; ENSG00000134160; TAA
TDQQLTTEW

SEQ ID NO: 90667 - protein, 8 aa, Homo sapiens
  Table A; Target 90667; HLA-B*37:01; TRPM1; ENSG00000134160; TAA
TDSKATEK

SEQ ID NO: 90668 - protein, 9 aa, Homo sapiens
  Table A; Target 90668; HLA-B*37:01; TRPM1; ENSG00000134160; TAA
TDSYGVLEF

SEQ ID NO: 90669 - protein, 9 aa, Homo sapiens
  Table A; Target 90669; HLA-C*04:01; TRPM1; ENSG00000134160; TAA
TDSYGVLEF

SEQ ID NO: 90670 - protein, 9 aa, Homo sapiens
  Table A; Target 90670; HLA-C*07:04; TRPM1; ENSG00000134160; TAA
TDSYGVLEF

SEQ ID NO: 90671 - protein, 9 aa, Homo sapiens
  Table A; Target 90671; HLA-B*37:01; TRPM1; ENSG00000134160; TAA
TEKEKKPPM

SEQ ID NO: 90672 - protein, 9 aa, Homo sapiens
  Table A; Target 90672; HLA-B*40:02; TRPM1; ENSG00000134160; TAA
TEKEKKPPM

SEQ ID NO: 90673 - protein, 10 aa, Homo sapiens
  Table A; Target 90673; HLA-B*49:01; TRPM1; ENSG00000134160; TAA
TEWQCQVQKI

SEQ ID NO: 90674 - protein, 8 aa, Homo sapiens
  Table A; Target 90674; HLA-B*51:01; TRPM1; ENSG00000134160; TAA
TFFEVKSI

SEQ ID NO: 90675 - protein, 9 aa, Homo sapiens
  Table A; Target 90675; HLA-A*33:03; TRPM1; ENSG00000134160; TAA
TFMIGAILR

SEQ ID NO: 90676 - protein, 10 aa, Homo sapiens
  Table A; Target 90676; HLA-A*23:01; TRPM1; ENSG00000134160; TAA
TFMIGAILRL

SEQ ID NO: 90677 - protein, 10 aa, Homo sapiens
  Table A; Target 90677; HLA-A*24:02; TRPM1; ENSG00000134160; TAA
TFMIGAILRL

SEQ ID NO: 90678 - protein, 11 aa, Homo sapiens
  Table A; Target 90678; HLA-B*27:05; TRPM1; ENSG00000134160; TAA
THFILADNGTL

SEQ ID NO: 90679 - protein, 11 aa, Homo sapiens
  Table A; Target 90679; HLA-B*38:01; TRPM1; ENSG00000134160; TAA
THFILADNGTL

SEQ ID NO: 90680 - protein, 9 aa, Homo sapiens
  Table A; Target 90680; HLA-A*29:02; TRPM1; ENSG00000134160; TAA
TIPRLEELY

SEQ ID NO: 90681 - protein, 8 aa, Homo sapiens
  Table A; Target 90681; HLA-A*30:02; TRPM1; ENSG00000134160; TAA
TIQKTFNY

SEQ ID NO: 90682 - protein, 8 aa, Homo sapiens
  Table A; Target 90682; HLA-B*15:01; TRPM1; ENSG00000134160; TAA
TIQKTFNY

SEQ ID NO: 90683 - protein, 8 aa, Homo sapiens
  Table A; Target 90683; HLA-B*37:01; TRPM1; ENSG00000134160; TAA
TIQKTFNY

SEQ ID NO: 90684 - protein, 10 aa, Homo sapiens
  Table A; Target 90684; HLA-A*03:02; TRPM1; ENSG00000134160; TAA
TIQKTFNYNK

SEQ ID NO: 90685 - protein, 10 aa, Homo sapiens
  Table A; Target 90685; HLA-A*11:01; TRPM1; ENSG00000134160; TAA
TIQKTFNYNK

SEQ ID NO: 90686 - protein, 10 aa, Homo sapiens
  Table A; Target 90686; HLA-A*03:01; TRPM1; ENSG00000134160; TAA
TLGFPSLRSK

SEQ ID NO: 90687 - protein, 9 aa, Homo sapiens
  Table A; Target 90687; HLA-A*02:01; TRPM1; ENSG00000134160; TAA
TLGKYGAEV

SEQ ID NO: 90688 - protein, 9 aa, Homo sapiens
  Table A; Target 90688; HLA-A*02:03; TRPM1; ENSG00000134160; TAA
TLGKYGAEV

SEQ ID NO: 90689 - protein, 10 aa, Homo sapiens
  Table A; Target 90689; HLA-A*03:01; TRPM1; ENSG00000134160; TAA
TLYNNLFGPK

SEQ ID NO: 90690 - protein, 10 aa, Homo sapiens
  Table A; Target 90690; HLA-A*03:02; TRPM1; ENSG00000134160; TAA
TLYNNLFGPK

SEQ ID NO: 90691 - protein, 10 aa, Homo sapiens
  Table A; Target 90691; HLA-A*11:01; TRPM1; ENSG00000134160; TAA
TLYNNLFGPK

SEQ ID NO: 90692 - protein, 10 aa, Homo sapiens
  Table A; Target 90692; HLA-B*27:02; TRPM1; ENSG00000134160; TAA
TLYNNLFGPK

SEQ ID NO: 90693 - protein, 9 aa, Homo sapiens
  Table A; Target 90693; HLA-A*03:01; TRPM1; ENSG00000134160; TAA
TMKSRSFVY

SEQ ID NO: 90694 - protein, 9 aa, Homo sapiens
  Table A; Target 90694; HLA-A*29:02; TRPM1; ENSG00000134160; TAA
TMKSRSFVY

SEQ ID NO: 90695 - protein, 9 aa, Homo sapiens
  Table A; Target 90695; HLA-A*30:02; TRPM1; ENSG00000134160; TAA
TMKSRSFVY

SEQ ID NO: 90696 - protein, 9 aa, Homo sapiens
  Table A; Target 90696; HLA-B*08:01; TRPM1; ENSG00000134160; TAA
TMKSRSFVY

SEQ ID NO: 90697 - protein, 9 aa, Homo sapiens
  Table A; Target 90697; HLA-B*15:01; TRPM1; ENSG00000134160; TAA
TMKSRSFVY

SEQ ID NO: 90698 - protein, 9 aa, Homo sapiens
  Table A; Target 90698; HLA-B*46:01; TRPM1; ENSG00000134160; TAA
TMKSRSFVY

SEQ ID NO: 90699 - protein, 9 aa, Homo sapiens
  Table A; Target 90699; HLA-C*07:01; TRPM1; ENSG00000134160; TAA
TMKSRSFVY

SEQ ID NO: 90700 - protein, 9 aa, Homo sapiens
  Table A; Target 90700; HLA-A*02:01; TRPM1; ENSG00000134160; TAA
TMSNPLSKL

SEQ ID NO: 90701 - protein, 9 aa, Homo sapiens
  Table A; Target 90701; HLA-A*02:03; TRPM1; ENSG00000134160; TAA
TMSNPLSKL

SEQ ID NO: 90702 - protein, 9 aa, Homo sapiens
  Table A; Target 90702; HLA-A*02:04; TRPM1; ENSG00000134160; TAA
TMSNPLSKL

SEQ ID NO: 90703 - protein, 9 aa, Homo sapiens
  Table A; Target 90703; HLA-A*02:07; TRPM1; ENSG00000134160; TAA
TMSNPLSKL

SEQ ID NO: 90704 - protein, 9 aa, Homo sapiens
  Table A; Target 90704; HLA-A*03:01; TRPM1; ENSG00000134160; TAA
TMSNPLSKL

SEQ ID NO: 90705 - protein, 9 aa, Homo sapiens
  Table A; Target 90705; HLA-A*23:01; TRPM1; ENSG00000134160; TAA
TMSNPLSKL

SEQ ID NO: 90706 - protein, 9 aa, Homo sapiens
  Table A; Target 90706; HLA-A*24:02; TRPM1; ENSG00000134160; TAA
TMSNPLSKL

SEQ ID NO: 90707 - protein, 9 aa, Homo sapiens
  Table A; Target 90707; HLA-A*32:01; TRPM1; ENSG00000134160; TAA
TMSNPLSKL

SEQ ID NO: 90708 - protein, 9 aa, Homo sapiens
  Table A; Target 90708; HLA-B*07:02; TRPM1; ENSG00000134160; TAA
TMSNPLSKL

SEQ ID NO: 90709 - protein, 9 aa, Homo sapiens
  Table A; Target 90709; HLA-B*27:05; TRPM1; ENSG00000134160; TAA
TMSNPLSKL

SEQ ID NO: 90710 - protein, 9 aa, Homo sapiens
  Table A; Target 90710; HLA-B*37:01; TRPM1; ENSG00000134160; TAA
TMSNPLSKL

SEQ ID NO: 90711 - protein, 9 aa, Homo sapiens
  Table A; Target 90711; HLA-B*38:01; TRPM1; ENSG00000134160; TAA
TMSNPLSKL

SEQ ID NO: 90712 - protein, 9 aa, Homo sapiens
  Table A; Target 90712; HLA-B*46:01; TRPM1; ENSG00000134160; TAA
TMSNPLSKL

SEQ ID NO: 90713 - protein, 9 aa, Homo sapiens
  Table A; Target 90713; HLA-B*55:01; TRPM1; ENSG00000134160; TAA
TMSNPLSKL

SEQ ID NO: 90714 - protein, 9 aa, Homo sapiens
  Table A; Target 90714; HLA-C*03:04; TRPM1; ENSG00000134160; TAA
TMSNPLSKL

SEQ ID NO: 90715 - protein, 9 aa, Homo sapiens
  Table A; Target 90715; HLA-C*05:01; TRPM1; ENSG00000134160; TAA
TMSNPLSKL

SEQ ID NO: 90716 - protein, 9 aa, Homo sapiens
  Table A; Target 90716; HLA-C*07:04; TRPM1; ENSG00000134160; TAA
TMSNPLSKL

SEQ ID NO: 90717 - protein, 9 aa, Homo sapiens
  Table A; Target 90717; HLA-C*12:03; TRPM1; ENSG00000134160; TAA
TMSNPLSKL

SEQ ID NO: 90718 - protein, 9 aa, Homo sapiens
  Table A; Target 90718; HLA-C*16:01; TRPM1; ENSG00000134160; TAA
TMSNPLSKL

SEQ ID NO: 90719 - protein, 9 aa, Homo sapiens
  Table A; Target 90719; HLA-C*16:02; TRPM1; ENSG00000134160; TAA
TMSNPLSKL

SEQ ID NO: 90720 - protein, 11 aa, Homo sapiens
  Table A; Target 90720; HLA-B*13:02; TRPM1; ENSG00000134160; TAA
TMSNPLSKLSV

SEQ ID NO: 90721 - protein, 9 aa, Homo sapiens
  Table A; Target 90721; HLA-A*25:01; TRPM1; ENSG00000134160; TAA
TNIEGTISY

SEQ ID NO: 90722 - protein, 9 aa, Homo sapiens
  Table A; Target 90722; HLA-A*26:01; TRPM1; ENSG00000134160; TAA
TNIEGTISY

SEQ ID NO: 90723 - protein, 9 aa, Homo sapiens
  Table A; Target 90723; HLA-A*29:02; TRPM1; ENSG00000134160; TAA
TNIEGTISY

SEQ ID NO: 90724 - protein, 9 aa, Homo sapiens
  Table A; Target 90724; HLA-A*30:02; TRPM1; ENSG00000134160; TAA
TNIEGTISY

SEQ ID NO: 90725 - protein, 9 aa, Homo sapiens
  Table A; Target 90725; HLA-A*32:01; TRPM1; ENSG00000134160; TAA
TNIEGTISY

SEQ ID NO: 90726 - protein, 9 aa, Homo sapiens
  Table A; Target 90726; HLA-B*15:01; TRPM1; ENSG00000134160; TAA
TNIEGTISY

SEQ ID NO: 90727 - protein, 9 aa, Homo sapiens
  Table A; Target 90727; HLA-B*15:03; TRPM1; ENSG00000134160; TAA
TNIEGTISY

SEQ ID NO: 90728 - protein, 9 aa, Homo sapiens
  Table A; Target 90728; HLA-B*18:01; TRPM1; ENSG00000134160; TAA
TNIEGTISY

SEQ ID NO: 90729 - protein, 9 aa, Homo sapiens
  Table A; Target 90729; HLA-B*35:01; TRPM1; ENSG00000134160; TAA
TNIEGTISY

SEQ ID NO: 90730 - protein, 9 aa, Homo sapiens
  Table A; Target 90730; HLA-B*39:01; TRPM1; ENSG00000134160; TAA
TNIEGTISY

SEQ ID NO: 90731 - protein, 9 aa, Homo sapiens
  Table A; Target 90731; HLA-B*44:02; TRPM1; ENSG00000134160; TAA
TNIEGTISY

SEQ ID NO: 90732 - protein, 9 aa, Homo sapiens
  Table A; Target 90732; HLA-B*44:03; TRPM1; ENSG00000134160; TAA
TNIEGTISY

SEQ ID NO: 90733 - protein, 9 aa, Homo sapiens
  Table A; Target 90733; HLA-B*46:01; TRPM1; ENSG00000134160; TAA
TNIEGTISY

SEQ ID NO: 90734 - protein, 9 aa, Homo sapiens
  Table A; Target 90734; HLA-B*58:01; TRPM1; ENSG00000134160; TAA
TNIEGTISY

SEQ ID NO: 90735 - protein, 9 aa, Homo sapiens
  Table A; Target 90735; HLA-C*01:02; TRPM1; ENSG00000134160; TAA
TNIEGTISY

SEQ ID NO: 90736 - protein, 9 aa, Homo sapiens
  Table A; Target 90736; HLA-C*02:02; TRPM1; ENSG00000134160; TAA
TNIEGTISY

SEQ ID NO: 90737 - protein, 9 aa, Homo sapiens
  Table A; Target 90737; HLA-C*03:03; TRPM1; ENSG00000134160; TAA
TNIEGTISY

SEQ ID NO: 90738 - protein, 9 aa, Homo sapiens
  Table A; Target 90738; HLA-C*07:04; TRPM1; ENSG00000134160; TAA
TNIEGTISY

SEQ ID NO: 90739 - protein, 9 aa, Homo sapiens
  Table A; Target 90739; HLA-C*07:06; TRPM1; ENSG00000134160; TAA
TNIEGTISY

SEQ ID NO: 90740 - protein, 9 aa, Homo sapiens
  Table A; Target 90740; HLA-C*14:02; TRPM1; ENSG00000134160; TAA
TNIEGTISY

SEQ ID NO: 90741 - protein, 9 aa, Homo sapiens
  Table A; Target 90741; HLA-C*16:01; TRPM1; ENSG00000134160; TAA
TNIEGTISY

SEQ ID NO: 90742 - protein, 9 aa, Homo sapiens
  Table A; Target 90742; HLA-C*16:04; TRPM1; ENSG00000134160; TAA
TNIEGTISY

SEQ ID NO: 90743 - protein, 9 aa, Homo sapiens
  Table A; Target 90743; HLA-B*39:01; TRPM1; ENSG00000134160; TAA
TNVSAPDQL

SEQ ID NO: 90744 - protein, 8 aa, Homo sapiens
  Table A; Target 90744; HLA-B*35:01; TRPM1; ENSG00000134160; TAA
TPALMACY

SEQ ID NO: 90745 - protein, 9 aa, Homo sapiens
  Table A; Target 90745; HLA-B*35:03; TRPM1; ENSG00000134160; TAA
TPALMACYL

SEQ ID NO: 90746 - protein, 9 aa, Homo sapiens
  Table A; Target 90746; HLA-B*07:02; TRPM1; ENSG00000134160; TAA
TPDGSHLAV

SEQ ID NO: 90747 - protein, 9 aa, Homo sapiens
  Table A; Target 90747; HLA-B*35:01; TRPM1; ENSG00000134160; TAA
TPDGSHLAV

SEQ ID NO: 90748 - protein, 9 aa, Homo sapiens
  Table A; Target 90748; HLA-B*35:03; TRPM1; ENSG00000134160; TAA
TPDGSHLAV

SEQ ID NO: 90749 - protein, 9 aa, Homo sapiens
  Table A; Target 90749; HLA-B*51:01; TRPM1; ENSG00000134160; TAA
TPDGSHLAV

SEQ ID NO: 90750 - protein, 9 aa, Homo sapiens
  Table A; Target 90750; HLA-B*55:01; TRPM1; ENSG00000134160; TAA
TPDGSHLAV

SEQ ID NO: 90751 - protein, 9 aa, Homo sapiens
  Table A; Target 90751; HLA-B*56:01; TRPM1; ENSG00000134160; TAA
TPDGSHLAV

SEQ ID NO: 90752 - protein, 9 aa, Homo sapiens
  Table A; Target 90752; HLA-C*05:01; TRPM1; ENSG00000134160; TAA
TPDGSHLAV

SEQ ID NO: 90753 - protein, 9 aa, Homo sapiens
  Table A; Target 90753; HLA-C*07:02; TRPM1; ENSG00000134160; TAA
TPDGSHLAV

SEQ ID NO: 90754 - protein, 10 aa, Homo sapiens
  Table A; Target 90754; HLA-B*13:02; TRPM1; ENSG00000134160; TAA
TQLTVETTNI

SEQ ID NO: 90755 - protein, 10 aa, Homo sapiens
  Table A; Target 90755; HLA-B*38:01; TRPM1; ENSG00000134160; TAA
TQLTVETTNI

SEQ ID NO: 90756 - protein, 9 aa, Homo sapiens
  Table A; Target 90756; HLA-A*26:01; TRPM1; ENSG00000134160; TAA
TQSYPTDSY

SEQ ID NO: 90757 - protein, 9 aa, Homo sapiens
  Table A; Target 90757; HLA-A*30:02; TRPM1; ENSG00000134160; TAA
TQSYPTDSY

SEQ ID NO: 90758 - protein, 9 aa, Homo sapiens
  Table A; Target 90758; HLA-A*32:01; TRPM1; ENSG00000134160; TAA
TQSYPTDSY

SEQ ID NO: 90759 - protein, 9 aa, Homo sapiens
  Table A; Target 90759; HLA-B*15:01; TRPM1; ENSG00000134160; TAA
TQSYPTDSY

SEQ ID NO: 90760 - protein, 9 aa, Homo sapiens
  Table A; Target 90760; HLA-B*15:03; TRPM1; ENSG00000134160; TAA
TQSYPTDSY

SEQ ID NO: 90761 - protein, 9 aa, Homo sapiens
  Table A; Target 90761; HLA-B*27:02; TRPM1; ENSG00000134160; TAA
TQSYPTDSY

SEQ ID NO: 90762 - protein, 9 aa, Homo sapiens
  Table A; Target 90762; HLA-B*27:05; TRPM1; ENSG00000134160; TAA
TQSYPTDSY

SEQ ID NO: 90763 - protein, 9 aa, Homo sapiens
  Table A; Target 90763; HLA-B*35:01; TRPM1; ENSG00000134160; TAA
TQSYPTDSY

SEQ ID NO: 90764 - protein, 9 aa, Homo sapiens
  Table A; Target 90764; HLA-B*38:01; TRPM1; ENSG00000134160; TAA
TQSYPTDSY

SEQ ID NO: 90765 - protein, 9 aa, Homo sapiens
  Table A; Target 90765; HLA-B*39:01; TRPM1; ENSG00000134160; TAA
TQSYPTDSY

SEQ ID NO: 90766 - protein, 9 aa, Homo sapiens
  Table A; Target 90766; HLA-B*46:01; TRPM1; ENSG00000134160; TAA
TQSYPTDSY

SEQ ID NO: 90767 - protein, 9 aa, Homo sapiens
  Table A; Target 90767; HLA-C*01:02; TRPM1; ENSG00000134160; TAA
TQSYPTDSY

SEQ ID NO: 90768 - protein, 9 aa, Homo sapiens
  Table A; Target 90768; HLA-C*07:04; TRPM1; ENSG00000134160; TAA
TQSYPTDSY

SEQ ID NO: 90769 - protein, 9 aa, Homo sapiens
  Table A; Target 90769; HLA-C*07:06; TRPM1; ENSG00000134160; TAA
TQSYPTDSY

SEQ ID NO: 90770 - protein, 9 aa, Homo sapiens
  Table A; Target 90770; HLA-C*14:02; TRPM1; ENSG00000134160; TAA
TQSYPTDSY

SEQ ID NO: 90771 - protein, 9 aa, Homo sapiens
  Table A; Target 90771; HLA-C*16:04; TRPM1; ENSG00000134160; TAA
TQSYPTDSY

SEQ ID NO: 90772 - protein, 11 aa, Homo sapiens
  Table A; Target 90772; HLA-B*38:01; TRPM1; ENSG00000134160; TAA
TQSYPTDSYGV

SEQ ID NO: 90773 - protein, 9 aa, Homo sapiens
  Table A; Target 90773; HLA-B*27:05; TRPM1; ENSG00000134160; TAA
TRLGPPNTL

SEQ ID NO: 90774 - protein, 9 aa, Homo sapiens
  Table A; Target 90774; HLA-B*38:01; TRPM1; ENSG00000134160; TAA
TRLGPPNTL

SEQ ID NO: 90775 - protein, 9 aa, Homo sapiens
  Table A; Target 90775; HLA-B*39:01; TRPM1; ENSG00000134160; TAA
TRLGPPNTL

SEQ ID NO: 90776 - protein, 9 aa, Homo sapiens
  Table A; Target 90776; HLA-C*06:02; TRPM1; ENSG00000134160; TAA
TRLGPPNTL

SEQ ID NO: 90777 - protein, 9 aa, Homo sapiens
  Table A; Target 90777; HLA-C*16:04; TRPM1; ENSG00000134160; TAA
TRLGPPNTL

SEQ ID NO: 90778 - protein, 9 aa, Homo sapiens
  Table A; Target 90778; HLA-B*27:05; TRPM1; ENSG00000134160; TAA
TRLGQGVPL

SEQ ID NO: 90779 - protein, 9 aa, Homo sapiens
  Table A; Target 90779; HLA-B*39:01; TRPM1; ENSG00000134160; TAA
TRLGQGVPL

SEQ ID NO: 90780 - protein, 9 aa, Homo sapiens
  Table A; Target 90780; HLA-B*38:01; TRPM1; ENSG00000134160; TAA
TRYFPDETI

SEQ ID NO: 90781 - protein, 10 aa, Homo sapiens
  Table A; Target 90781; HLA-A*01:01; TRPM1; ENSG00000134160; TAA
TSERVENMSM

SEQ ID NO: 90782 - protein, 9 aa, Homo sapiens
  Table A; Target 90782; HLA-C*07:06; TRPM1; ENSG00000134160; TAA
TSLQTVDLR

SEQ ID NO: 90783 - protein, 9 aa, Homo sapiens
  Table A; Target 90783; HLA-A*03:02; TRPM1; ENSG00000134160; TAA
TSPGTGVRK

SEQ ID NO: 90784 - protein, 9 aa, Homo sapiens
  Table A; Target 90784; HLA-A*11:01; TRPM1; ENSG00000134160; TAA
TSPGTGVRK

SEQ ID NO: 90785 - protein, 10 aa, Homo sapiens
  Table A; Target 90785; HLA-A*03:02; TRPM1; ENSG00000134160; TAA
TTEWQCQVQK

SEQ ID NO: 90786 - protein, 10 aa, Homo sapiens
  Table A; Target 90786; HLA-A*01:01; TRPM1; ENSG00000134160; TAA
TTNIEGTISY

SEQ ID NO: 90787 - protein, 10 aa, Homo sapiens
  Table A; Target 90787; HLA-A*25:01; TRPM1; ENSG00000134160; TAA
TTNIEGTISY

SEQ ID NO: 90788 - protein, 10 aa, Homo sapiens
  Table A; Target 90788; HLA-A*26:01; TRPM1; ENSG00000134160; TAA
TTNIEGTISY

SEQ ID NO: 90789 - protein, 10 aa, Homo sapiens
  Table A; Target 90789; HLA-A*29:02; TRPM1; ENSG00000134160; TAA
TTNIEGTISY

SEQ ID NO: 90790 - protein, 10 aa, Homo sapiens
  Table A; Target 90790; HLA-A*30:02; TRPM1; ENSG00000134160; TAA
TTNIEGTISY

SEQ ID NO: 90791 - protein, 10 aa, Homo sapiens
  Table A; Target 90791; HLA-A*32:01; TRPM1; ENSG00000134160; TAA
TTNIEGTISY

SEQ ID NO: 90792 - protein, 10 aa, Homo sapiens
  Table A; Target 90792; HLA-B*15:01; TRPM1; ENSG00000134160; TAA
TTNIEGTISY

SEQ ID NO: 90793 - protein, 10 aa, Homo sapiens
  Table A; Target 90793; HLA-B*46:01; TRPM1; ENSG00000134160; TAA
TTNIEGTISY

SEQ ID NO: 90794 - protein, 10 aa, Homo sapiens
  Table A; Target 90794; HLA-C*07:06; TRPM1; ENSG00000134160; TAA
TTNIEGTISY

SEQ ID NO: 90795 - protein, 9 aa, Homo sapiens
  Table A; Target 90795; HLA-A*02:07; TRPM1; ENSG00000134160; TAA
TVDLRLAQL

SEQ ID NO: 90796 - protein, 9 aa, Homo sapiens
  Table A; Target 90796; HLA-B*07:02; TRPM1; ENSG00000134160; TAA
TVDLRLAQL

SEQ ID NO: 90797 - protein, 9 aa, Homo sapiens
  Table A; Target 90797; HLA-B*08:01; TRPM1; ENSG00000134160; TAA
TVDLRLAQL

SEQ ID NO: 90798 - protein, 9 aa, Homo sapiens
  Table A; Target 90798; HLA-C*05:01; TRPM1; ENSG00000134160; TAA
TVDLRLAQL

SEQ ID NO: 90799 - protein, 9 aa, Homo sapiens
  Table A; Target 90799; HLA-B*35:03; TRPM1; ENSG00000134160; TAA
TYDDFSYQT

SEQ ID NO: 90800 - protein, 9 aa, Homo sapiens
  Table A; Target 90800; HLA-A*23:01; TRPM1; ENSG00000134160; TAA
TYLLRQSSI

SEQ ID NO: 90801 - protein, 9 aa, Homo sapiens
  Table A; Target 90801; HLA-A*24:02; TRPM1; ENSG00000134160; TAA
TYLLRQSSI

SEQ ID NO: 90802 - protein, 9 aa, Homo sapiens
  Table A; Target 90802; HLA-B*08:01; TRPM1; ENSG00000134160; TAA
TYLLRQSSI

SEQ ID NO: 90803 - protein, 9 aa, Homo sapiens
  Table A; Target 90803; HLA-B*37:01; TRPM1; ENSG00000134160; TAA
TYLLRQSSI

SEQ ID NO: 90804 - protein, 9 aa, Homo sapiens
  Table A; Target 90804; HLA-C*01:02; TRPM1; ENSG00000134160; TAA
TYLLRQSSI

SEQ ID NO: 90805 - protein, 9 aa, Homo sapiens
  Table A; Target 90805; HLA-C*07:02; TRPM1; ENSG00000134160; TAA
TYLLRQSSI

SEQ ID NO: 90806 - protein, 9 aa, Homo sapiens
  Table A; Target 90806; HLA-C*14:02; TRPM1; ENSG00000134160; TAA
TYLLRQSSI

SEQ ID NO: 90807 - protein, 8 aa, Homo sapiens
  Table A; Target 90807; HLA-B*51:01; TRPM1; ENSG00000134160; TAA
VAEAIPRI

SEQ ID NO: 90808 - protein, 8 aa, Homo sapiens
  Table A; Target 90808; HLA-B*51:01; TRPM1; ENSG00000134160; TAA
VAISTFMI

SEQ ID NO: 90809 - protein, 8 aa, Homo sapiens
  Table A; Target 90809; HLA-A*30:02; TRPM1; ENSG00000134160; TAA
VAKHTQSY

SEQ ID NO: 90810 - protein, 8 aa, Homo sapiens
  Table A; Target 90810; HLA-A*32:01; TRPM1; ENSG00000134160; TAA
VAKHTQSY

SEQ ID NO: 90811 - protein, 8 aa, Homo sapiens
  Table A; Target 90811; HLA-B*08:01; TRPM1; ENSG00000134160; TAA
VAKHTQSY

SEQ ID NO: 90812 - protein, 8 aa, Homo sapiens
  Table A; Target 90812; HLA-B*15:01; TRPM1; ENSG00000134160; TAA
VAKHTQSY

SEQ ID NO: 90813 - protein, 8 aa, Homo sapiens
  Table A; Target 90813; HLA-B*15:03; TRPM1; ENSG00000134160; TAA
VAKHTQSY

SEQ ID NO: 90814 - protein, 8 aa, Homo sapiens
  Table A; Target 90814; HLA-B*46:01; TRPM1; ENSG00000134160; TAA
VAKHTQSY

SEQ ID NO: 90815 - protein, 8 aa, Homo sapiens
  Table A; Target 90815; HLA-B*58:01; TRPM1; ENSG00000134160; TAA
VAKHTQSY

SEQ ID NO: 90816 - protein, 8 aa, Homo sapiens
  Table A; Target 90816; HLA-C*02:02; TRPM1; ENSG00000134160; TAA
VAKHTQSY

SEQ ID NO: 90817 - protein, 8 aa, Homo sapiens
  Table A; Target 90817; HLA-C*12:03; TRPM1; ENSG00000134160; TAA
VAKHTQSY

SEQ ID NO: 90818 - protein, 8 aa, Homo sapiens
  Table A; Target 90818; HLA-C*16:01; TRPM1; ENSG00000134160; TAA
VAKHTQSY

SEQ ID NO: 90819 - protein, 8 aa, Homo sapiens
  Table A; Target 90819; HLA-C*16:02; TRPM1; ENSG00000134160; TAA
VAKHTQSY

SEQ ID NO: 90820 - protein, 9 aa, Homo sapiens
  Table A; Target 90820; HLA-C*02:02; TRPM1; ENSG00000134160; TAA
VANILLVNL

SEQ ID NO: 90821 - protein, 8 aa, Homo sapiens
  Table A; Target 90821; HLA-C*05:01; TRPM1; ENSG00000134160; TAA
VDDISQDL

SEQ ID NO: 90822 - protein, 8 aa, Homo sapiens
  Table A; Target 90822; HLA-B*27:02; TRPM1; ENSG00000134160; TAA
VDDPAVSR

SEQ ID NO: 90823 - protein, 9 aa, Homo sapiens
  Table A; Target 90823; HLA-A*02:07; TRPM1; ENSG00000134160; TAA
VDDPAVSRF

SEQ ID NO: 90824 - protein, 9 aa, Homo sapiens
  Table A; Target 90824; HLA-A*23:01; TRPM1; ENSG00000134160; TAA
VDDPAVSRF

SEQ ID NO: 90825 - protein, 9 aa, Homo sapiens
  Table A; Target 90825; HLA-A*24:02; TRPM1; ENSG00000134160; TAA
VDDPAVSRF

SEQ ID NO: 90826 - protein, 9 aa, Homo sapiens
  Table A; Target 90826; HLA-A*32:01; TRPM1; ENSG00000134160; TAA
VDDPAVSRF

SEQ ID NO: 90827 - protein, 9 aa, Homo sapiens
  Table A; Target 90827; HLA-B*18:01; TRPM1; ENSG00000134160; TAA
VDDPAVSRF

SEQ ID NO: 90828 - protein, 9 aa, Homo sapiens
  Table A; Target 90828; HLA-B*37:01; TRPM1; ENSG00000134160; TAA
VDDPAVSRF

SEQ ID NO: 90829 - protein, 9 aa, Homo sapiens
  Table A; Target 90829; HLA-B*38:01; TRPM1; ENSG00000134160; TAA
VDDPAVSRF

SEQ ID NO: 90830 - protein, 9 aa, Homo sapiens
  Table A; Target 90830; HLA-B*44:02; TRPM1; ENSG00000134160; TAA
VDDPAVSRF

SEQ ID NO: 90831 - protein, 9 aa, Homo sapiens
  Table A; Target 90831; HLA-B*44:03; TRPM1; ENSG00000134160; TAA
VDDPAVSRF

SEQ ID NO: 90832 - protein, 9 aa, Homo sapiens
  Table A; Target 90832; HLA-C*04:01; TRPM1; ENSG00000134160; TAA
VDDPAVSRF

SEQ ID NO: 90833 - protein, 9 aa, Homo sapiens
  Table A; Target 90833; HLA-C*05:01; TRPM1; ENSG00000134160; TAA
VDDPAVSRF

SEQ ID NO: 90834 - protein, 9 aa, Homo sapiens
  Table A; Target 90834; HLA-C*16:04; TRPM1; ENSG00000134160; TAA
VDDPAVSRF

SEQ ID NO: 90835 - protein, 11 aa, Homo sapiens
  Table A; Target 90835; HLA-A*01:01; TRPM1; ENSG00000134160; TAA
VDDPAVSRFQY

SEQ ID NO: 90836 - protein, 11 aa, Homo sapiens
  Table A; Target 90836; HLA-A*30:02; TRPM1; ENSG00000134160; TAA
VDDPAVSRFQY

SEQ ID NO: 90837 - protein, 9 aa, Homo sapiens
  Table A; Target 90837; HLA-B*37:01; TRPM1; ENSG00000134160; TAA
VDIARSQIF

SEQ ID NO: 90838 - protein, 9 aa, Homo sapiens
  Table A; Target 90838; HLA-B*40:02; TRPM1; ENSG00000134160; TAA
VDIARSQIF

SEQ ID NO: 90839 - protein, 9 aa, Homo sapiens
  Table A; Target 90839; HLA-B*44:02; TRPM1; ENSG00000134160; TAA
VDIARSQIF

SEQ ID NO: 90840 - protein, 9 aa, Homo sapiens
  Table A; Target 90840; HLA-C*07:04; TRPM1; ENSG00000134160; TAA
VDIARSQIF

SEQ ID NO: 90841 - protein, 9 aa, Homo sapiens
  Table A; Target 90841; HLA-C*12:03; TRPM1; ENSG00000134160; TAA
VDIARSQIF

SEQ ID NO: 90842 - protein, 8 aa, Homo sapiens
  Table A; Target 90842; HLA-B*37:01; TRPM1; ENSG00000134160; TAA
VDLRLAQL

SEQ ID NO: 90843 - protein, 10 aa, Homo sapiens
  Table A; Target 90843; HLA-B*40:01; TRPM1; ENSG00000134160; TAA
VEEETDPRKI

SEQ ID NO: 90844 - protein, 10 aa, Homo sapiens
  Table A; Target 90844; HLA-B*49:01; TRPM1; ENSG00000134160; TAA
VEEETDPRKI

SEQ ID NO: 90845 - protein, 8 aa, Homo sapiens
  Table A; Target 90845; HLA-B*40:01; TRPM1; ENSG00000134160; TAA
VEGGPNVV

SEQ ID NO: 90846 - protein, 8 aa, Homo sapiens
  Table A; Target 90846; HLA-B*49:01; TRPM1; ENSG00000134160; TAA
VEGGPNVV

SEQ ID NO: 90847 - protein, 8 aa, Homo sapiens
  Table A; Target 90847; HLA-C*12:03; TRPM1; ENSG00000134160; TAA
VEGGPNVV

SEQ ID NO: 90848 - protein, 10 aa, Homo sapiens
  Table A; Target 90848; HLA-A*30:01; TRPM1; ENSG00000134160; TAA
VEGGPNVVSI

SEQ ID NO: 90849 - protein, 10 aa, Homo sapiens
  Table A; Target 90849; HLA-B*40:01; TRPM1; ENSG00000134160; TAA
VEGGPNVVSI

SEQ ID NO: 90850 - protein, 10 aa, Homo sapiens
  Table A; Target 90850; HLA-B*49:01; TRPM1; ENSG00000134160; TAA
VEGGPNVVSI

SEQ ID NO: 90851 - protein, 11 aa, Homo sapiens
  Table A; Target 90851; HLA-B*49:01; TRPM1; ENSG00000134160; TAA
VEGGPNVVSIV

SEQ ID NO: 90852 - protein, 8 aa, Homo sapiens
  Table A; Target 90852; HLA-B*18:01; TRPM1; ENSG00000134160; TAA
VENMSMRL

SEQ ID NO: 90853 - protein, 8 aa, Homo sapiens
  Table A; Target 90853; HLA-B*37:01; TRPM1; ENSG00000134160; TAA
VENMSMRL

SEQ ID NO: 90854 - protein, 8 aa, Homo sapiens
  Table A; Target 90854; HLA-B*40:01; TRPM1; ENSG00000134160; TAA
VENMSMRL

SEQ ID NO: 90855 - protein, 8 aa, Homo sapiens
  Table A; Target 90855; HLA-B*18:01; TRPM1; ENSG00000134160; TAA
VETQPEKW

SEQ ID NO: 90856 - protein, 8 aa, Homo sapiens
  Table A; Target 90856; HLA-B*27:02; TRPM1; ENSG00000134160; TAA
VETQPEKW

SEQ ID NO: 90857 - protein, 8 aa, Homo sapiens
  Table A; Target 90857; HLA-B*44:02; TRPM1; ENSG00000134160; TAA
VETQPEKW

SEQ ID NO: 90858 - protein, 8 aa, Homo sapiens
  Table A; Target 90858; HLA-B*44:03; TRPM1; ENSG00000134160; TAA
VETQPEKW

SEQ ID NO: 90859 - protein, 8 aa, Homo sapiens
  Table A; Target 90859; HLA-C*16:04; TRPM1; ENSG00000134160; TAA
VETQPEKW

SEQ ID NO: 90860 - protein, 10 aa, Homo sapiens
  Table A; Target 90860; HLA-B*49:01; TRPM1; ENSG00000134160; TAA
VETQPEKWSV

SEQ ID NO: 90861 - protein, 10 aa, Homo sapiens
  Table A; Target 90861; HLA-A*30:01; TRPM1; ENSG00000134160; TAA
VETTNIEGTI

SEQ ID NO: 90862 - protein, 10 aa, Homo sapiens
  Table A; Target 90862; HLA-B*40:01; TRPM1; ENSG00000134160; TAA
VETTNIEGTI

SEQ ID NO: 90863 - protein, 10 aa, Homo sapiens
  Table A; Target 90863; HLA-B*49:01; TRPM1; ENSG00000134160; TAA
VETTNIEGTI

SEQ ID NO: 90864 - protein, 9 aa, Homo sapiens
  Table A; Target 90864; HLA-B*49:01; TRPM1; ENSG00000134160; TAA
VEYSSITDQ

SEQ ID NO: 90865 - protein, 11 aa, Homo sapiens
  Table A; Target 90865; HLA-A*30:01; TRPM1; ENSG00000134160; TAA
VEYSSITDQQL

SEQ ID NO: 90866 - protein, 11 aa, Homo sapiens
  Table A; Target 90866; HLA-B*39:01; TRPM1; ENSG00000134160; TAA
VEYSSITDQQL

SEQ ID NO: 90867 - protein, 11 aa, Homo sapiens
  Table A; Target 90867; HLA-B*40:01; TRPM1; ENSG00000134160; TAA
VEYSSITDQQL

SEQ ID NO: 90868 - protein, 11 aa, Homo sapiens
  Table A; Target 90868; HLA-B*40:02; TRPM1; ENSG00000134160; TAA
VEYSSITDQQL

SEQ ID NO: 90869 - protein, 11 aa, Homo sapiens
  Table A; Target 90869; HLA-B*44:02; TRPM1; ENSG00000134160; TAA
VEYSSITDQQL

SEQ ID NO: 90870 - protein, 11 aa, Homo sapiens
  Table A; Target 90870; HLA-B*44:03; TRPM1; ENSG00000134160; TAA
VEYSSITDQQL

SEQ ID NO: 90871 - protein, 11 aa, Homo sapiens
  Table A; Target 90871; HLA-B*49:01; TRPM1; ENSG00000134160; TAA
VEYSSITDQQL

SEQ ID NO: 90872 - protein, 9 aa, Homo sapiens
  Table A; Target 90872; HLA-A*01:01; TRPM1; ENSG00000134160; TAA
VFADQIDLY

SEQ ID NO: 90873 - protein, 9 aa, Homo sapiens
  Table A; Target 90873; HLA-A*23:01; TRPM1; ENSG00000134160; TAA
VFADQIDLY

SEQ ID NO: 90874 - protein, 9 aa, Homo sapiens
  Table A; Target 90874; HLA-A*24:02; TRPM1; ENSG00000134160; TAA
VFADQIDLY

SEQ ID NO: 90875 - protein, 9 aa, Homo sapiens
  Table A; Target 90875; HLA-A*29:02; TRPM1; ENSG00000134160; TAA
VFADQIDLY

SEQ ID NO: 90876 - protein, 9 aa, Homo sapiens
  Table A; Target 90876; HLA-A*30:02; TRPM1; ENSG00000134160; TAA
VFADQIDLY

SEQ ID NO: 90877 - protein, 9 aa, Homo sapiens
  Table A; Target 90877; HLA-B*15:01; TRPM1; ENSG00000134160; TAA
VFADQIDLY

SEQ ID NO: 90878 - protein, 9 aa, Homo sapiens
  Table A; Target 90878; HLA-B*15:03; TRPM1; ENSG00000134160; TAA
VFADQIDLY

SEQ ID NO: 90879 - protein, 9 aa, Homo sapiens
  Table A; Target 90879; HLA-B*35:01; TRPM1; ENSG00000134160; TAA
VFADQIDLY

SEQ ID NO: 90880 - protein, 9 aa, Homo sapiens
  Table A; Target 90880; HLA-B*46:01; TRPM1; ENSG00000134160; TAA
VFADQIDLY

SEQ ID NO: 90881 - protein, 9 aa, Homo sapiens
  Table A; Target 90881; HLA-B*55:01; TRPM1; ENSG00000134160; TAA
VFADQIDLY

SEQ ID NO: 90882 - protein, 9 aa, Homo sapiens
  Table A; Target 90882; HLA-C*14:02; TRPM1; ENSG00000134160; TAA
VFADQIDLY

SEQ ID NO: 90883 - protein, 9 aa, Homo sapiens
  Table A; Target 90883; HLA-A*24:02; TRPM1; ENSG00000134160; TAA
VFGPHWPPL

SEQ ID NO: 90884 - protein, 9 aa, Homo sapiens
  Table A; Target 90884; HLA-A*29:02; TRPM1; ENSG00000134160; TAA
VFNNTFFEV

SEQ ID NO: 90885 - protein, 9 aa, Homo sapiens
  Table A; Target 90885; HLA-C*14:02; TRPM1; ENSG00000134160; TAA
VFNNTFFEV

SEQ ID NO: 90886 - protein, 9 aa, Homo sapiens
  Table A; Target 90886; HLA-A*29:02; TRPM1; ENSG00000134160; TAA
VGKDVTRVY

SEQ ID NO: 90887 - protein, 9 aa, Homo sapiens
  Table A; Target 90887; HLA-A*30:02; TRPM1; ENSG00000134160; TAA
VGKDVTRVY

SEQ ID NO: 90888 - protein, 9 aa, Homo sapiens
  Table A; Target 90888; HLA-A*32:01; TRPM1; ENSG00000134160; TAA
VGKDVTRVY

SEQ ID NO: 90889 - protein, 9 aa, Homo sapiens
  Table A; Target 90889; HLA-B*08:01; TRPM1; ENSG00000134160; TAA
VGKDVTRVY

SEQ ID NO: 90890 - protein, 9 aa, Homo sapiens
  Table A; Target 90890; HLA-B*15:01; TRPM1; ENSG00000134160; TAA
VGKDVTRVY

SEQ ID NO: 90891 - protein, 9 aa, Homo sapiens
  Table A; Target 90891; HLA-B*15:03; TRPM1; ENSG00000134160; TAA
VGKDVTRVY

SEQ ID NO: 90892 - protein, 9 aa, Homo sapiens
  Table A; Target 90892; HLA-B*46:01; TRPM1; ENSG00000134160; TAA
VGKDVTRVY

SEQ ID NO: 90893 - protein, 9 aa, Homo sapiens
  Table A; Target 90893; HLA-B*57:01; TRPM1; ENSG00000134160; TAA
VGKDVTRVY

SEQ ID NO: 90894 - protein, 9 aa, Homo sapiens
  Table A; Target 90894; HLA-C*01:02; TRPM1; ENSG00000134160; TAA
VGKDVTRVY

SEQ ID NO: 90895 - protein, 9 aa, Homo sapiens
  Table A; Target 90895; HLA-C*02:02; TRPM1; ENSG00000134160; TAA
VGKDVTRVY

SEQ ID NO: 90896 - protein, 9 aa, Homo sapiens
  Table A; Target 90896; HLA-C*06:02; TRPM1; ENSG00000134160; TAA
VGKDVTRVY

SEQ ID NO: 90897 - protein, 9 aa, Homo sapiens
  Table A; Target 90897; HLA-C*07:01; TRPM1; ENSG00000134160; TAA
VGKDVTRVY

SEQ ID NO: 90898 - protein, 9 aa, Homo sapiens
  Table A; Target 90898; HLA-C*07:04; TRPM1; ENSG00000134160; TAA
VGKDVTRVY

SEQ ID NO: 90899 - protein, 9 aa, Homo sapiens
  Table A; Target 90899; HLA-C*12:03; TRPM1; ENSG00000134160; TAA
VGKDVTRVY

SEQ ID NO: 90900 - protein, 9 aa, Homo sapiens
  Table A; Target 90900; HLA-C*14:02; TRPM1; ENSG00000134160; TAA
VGKDVTRVY

SEQ ID NO: 90901 - protein, 9 aa, Homo sapiens
  Table A; Target 90901; HLA-C*16:01; TRPM1; ENSG00000134160; TAA
VGKDVTRVY

SEQ ID NO: 90902 - protein, 9 aa, Homo sapiens
  Table A; Target 90902; HLA-C*16:02; TRPM1; ENSG00000134160; TAA
VGKDVTRVY

SEQ ID NO: 90903 - protein, 9 aa, Homo sapiens
  Table A; Target 90903; HLA-C*16:04; TRPM1; ENSG00000134160; TAA
VGKDVTRVY

SEQ ID NO: 90904 - protein, 8 aa, Homo sapiens
  Table A; Target 90904; HLA-B*37:01; TRPM1; ENSG00000134160; TAA
VIMLVVLM

SEQ ID NO: 90905 - protein, 9 aa, Homo sapiens
  Table A; Target 90905; HLA-A*02:07; TRPM1; ENSG00000134160; TAA
VISHVGDAL

SEQ ID NO: 90906 - protein, 9 aa, Homo sapiens
  Table A; Target 90906; HLA-B*07:02; TRPM1; ENSG00000134160; TAA
VISHVGDAL

SEQ ID NO: 90907 - protein, 9 aa, Homo sapiens
  Table A; Target 90907; HLA-B*35:03; TRPM1; ENSG00000134160; TAA
VISHVGDAL

SEQ ID NO: 90908 - protein, 9 aa, Homo sapiens
  Table A; Target 90908; HLA-B*38:01; TRPM1; ENSG00000134160; TAA
VISHVGDAL

SEQ ID NO: 90909 - protein, 9 aa, Homo sapiens
  Table A; Target 90909; HLA-B*39:01; TRPM1; ENSG00000134160; TAA
VISHVGDAL

SEQ ID NO: 90910 - protein, 9 aa, Homo sapiens
  Table A; Target 90910; HLA-B*40:01; TRPM1; ENSG00000134160; TAA
VISHVGDAL

SEQ ID NO: 90911 - protein, 9 aa, Homo sapiens
  Table A; Target 90911; HLA-C*01:02; TRPM1; ENSG00000134160; TAA
VISHVGDAL

SEQ ID NO: 90912 - protein, 9 aa, Homo sapiens
  Table A; Target 90912; HLA-C*03:03; TRPM1; ENSG00000134160; TAA
VISHVGDAL

SEQ ID NO: 90913 - protein, 9 aa, Homo sapiens
  Table A; Target 90913; HLA-C*03:04; TRPM1; ENSG00000134160; TAA
VISHVGDAL

SEQ ID NO: 90914 - protein, 9 aa, Homo sapiens
  Table A; Target 90914; HLA-C*05:01; TRPM1; ENSG00000134160; TAA
VISHVGDAL

SEQ ID NO: 90915 - protein, 9 aa, Homo sapiens
  Table A; Target 90915; HLA-C*07:04; TRPM1; ENSG00000134160; TAA
VISHVGDAL

SEQ ID NO: 90916 - protein, 9 aa, Homo sapiens
  Table A; Target 90916; HLA-C*16:01; TRPM1; ENSG00000134160; TAA
VISHVGDAL

SEQ ID NO: 90917 - protein, 9 aa, Homo sapiens
  Table A; Target 90917; HLA-C*16:04; TRPM1; ENSG00000134160; TAA
VISHVGDAL

SEQ ID NO: 90918 - protein, 10 aa, Homo sapiens
  Table A; Target 90918; HLA-A*03:02; TRPM1; ENSG00000134160; TAA
VISHVGDALK

SEQ ID NO: 90919 - protein, 11 aa, Homo sapiens
  Table A; Target 90919; HLA-A*03:02; TRPM1; ENSG00000134160; TAA
VIVSGMTAEEK

SEQ ID NO: 90920 - protein, 10 aa, Homo sapiens
  Table A; Target 90920; HLA-A*30:02; TRPM1; ENSG00000134160; TAA
VKKSNLPPDY

SEQ ID NO: 90921 - protein, 9 aa, Homo sapiens
  Table A; Target 90921; HLA-B*15:03; TRPM1; ENSG00000134160; TAA
VKPDQTLGF

SEQ ID NO: 90922 - protein, 9 aa, Homo sapiens
  Table A; Target 90922; HLA-B*15:03; TRPM1; ENSG00000134160; TAA
VKSISNQVW

SEQ ID NO: 90923 - protein, 9 aa, Homo sapiens
  Table A; Target 90923; HLA-A*01:01; TRPM1; ENSG00000134160; TAA
VLDIFGVNK

SEQ ID NO: 90924 - protein, 9 aa, Homo sapiens
  Table A; Target 90924; HLA-A*03:01; TRPM1; ENSG00000134160; TAA
VLDIFGVNK

SEQ ID NO: 90925 - protein, 9 aa, Homo sapiens
  Table A; Target 90925; HLA-A*03:02; TRPM1; ENSG00000134160; TAA
VLDIFGVNK

SEQ ID NO: 90926 - protein, 9 aa, Homo sapiens
  Table A; Target 90926; HLA-A*11:01; TRPM1; ENSG00000134160; TAA
VLDIFGVNK

SEQ ID NO: 90927 - protein, 10 aa, Homo sapiens
  Table A; Target 90927; HLA-A*01:01; TRPM1; ENSG00000134160; TAA
VLDIFGVNKY

SEQ ID NO: 90928 - protein, 10 aa, Homo sapiens
  Table A; Target 90928; HLA-A*30:02; TRPM1; ENSG00000134160; TAA
VLDIFGVNKY

SEQ ID NO: 90929 - protein, 10 aa, Homo sapiens
  Table A; Target 90929; HLA-B*15:01; TRPM1; ENSG00000134160; TAA
VLDIFGVNKY

SEQ ID NO: 90930 - protein, 10 aa, Homo sapiens
  Table A; Target 90930; HLA-A*02:07; TRPM1; ENSG00000134160; TAA
VLDRVDFVKL

SEQ ID NO: 90931 - protein, 9 aa, Homo sapiens
  Table A; Target 90931; HLA-A*01:01; TRPM1; ENSG00000134160; TAA
VLEFQGGGY

SEQ ID NO: 90932 - protein, 9 aa, Homo sapiens
  Table A; Target 90932; HLA-A*30:02; TRPM1; ENSG00000134160; TAA
VLEFQGGGY

SEQ ID NO: 90933 - protein, 9 aa, Homo sapiens
  Table A; Target 90933; HLA-B*15:01; TRPM1; ENSG00000134160; TAA
VLEFQGGGY

SEQ ID NO: 90934 - protein, 10 aa, Homo sapiens
  Table A; Target 90934; HLA-A*01:01; TRPM1; ENSG00000134160; TAA
VLEYLMGGAY

SEQ ID NO: 90935 - protein, 10 aa, Homo sapiens
  Table A; Target 90935; HLA-A*30:02; TRPM1; ENSG00000134160; TAA
VLEYLMGGAY

SEQ ID NO: 90936 - protein, 8 aa, Homo sapiens
  Table A; Target 90936; HLA-B*08:01; TRPM1; ENSG00000134160; TAA
VLMKRQKM

SEQ ID NO: 90937 - protein, 9 aa, Homo sapiens
  Table A; Target 90937; HLA-A*03:01; TRPM1; ENSG00000134160; TAA
VLMSFGVAR

SEQ ID NO: 90938 - protein, 9 aa, Homo sapiens
  Table A; Target 90938; HLA-A*03:02; TRPM1; ENSG00000134160; TAA
VLMSFGVAR

SEQ ID NO: 90939 - protein, 9 aa, Homo sapiens
  Table A; Target 90939; HLA-A*11:01; TRPM1; ENSG00000134160; TAA
VLMSFGVAR

SEQ ID NO: 90940 - protein, 9 aa, Homo sapiens
  Table A; Target 90940; HLA-A*31:01; TRPM1; ENSG00000134160; TAA
VLMSFGVAR

SEQ ID NO: 90941 - protein, 9 aa, Homo sapiens
  Table A; Target 90941; HLA-A*33:01; TRPM1; ENSG00000134160; TAA
VLMSFGVAR

SEQ ID NO: 90942 - protein, 9 aa, Homo sapiens
  Table A; Target 90942; HLA-A*33:03; TRPM1; ENSG00000134160; TAA
VLMSFGVAR

SEQ ID NO: 90943 - protein, 9 aa, Homo sapiens
  Table A; Target 90943; HLA-A*23:01; TRPM1; ENSG00000134160; TAA
VLNNSHTHF

SEQ ID NO: 90944 - protein, 9 aa, Homo sapiens
  Table A; Target 90944; HLA-A*24:02; TRPM1; ENSG00000134160; TAA
VLNNSHTHF

SEQ ID NO: 90945 - protein, 9 aa, Homo sapiens
  Table A; Target 90945; HLA-A*29:02; TRPM1; ENSG00000134160; TAA
VLNNSHTHF

SEQ ID NO: 90946 - protein, 9 aa, Homo sapiens
  Table A; Target 90946; HLA-A*32:01; TRPM1; ENSG00000134160; TAA
VLNNSHTHF

SEQ ID NO: 90947 - protein, 9 aa, Homo sapiens
  Table A; Target 90947; HLA-B*15:01; TRPM1; ENSG00000134160; TAA
VLNNSHTHF

SEQ ID NO: 90948 - protein, 9 aa, Homo sapiens
  Table A; Target 90948; HLA-B*46:01; TRPM1; ENSG00000134160; TAA
VLNNSHTHF

SEQ ID NO: 90949 - protein, 9 aa, Homo sapiens
  Table A; Target 90949; HLA-C*07:04; TRPM1; ENSG00000134160; TAA
VLNNSHTHF

SEQ ID NO: 90950 - protein, 9 aa, Homo sapiens
  Table A; Target 90950; HLA-A*02:07; TRPM1; ENSG00000134160; TAA
VLPPPMIIL

SEQ ID NO: 90951 - protein, 9 aa, Homo sapiens
  Table A; Target 90951; HLA-A*24:02; TRPM1; ENSG00000134160; TAA
VLPPPMIIL

SEQ ID NO: 90952 - protein, 9 aa, Homo sapiens
  Table A; Target 90952; HLA-A*23:01; TRPM1; ENSG00000134160; TAA
VNMQHFLTI

SEQ ID NO: 90953 - protein, 8 aa, Homo sapiens
  Table A; Target 90953; HLA-B*07:02; TRPM1; ENSG00000134160; TAA
VPLVGLVV

SEQ ID NO: 90954 - protein, 8 aa, Homo sapiens
  Table A; Target 90954; HLA-B*08:01; TRPM1; ENSG00000134160; TAA
VPLVGLVV

SEQ ID NO: 90955 - protein, 8 aa, Homo sapiens
  Table A; Target 90955; HLA-B*51:01; TRPM1; ENSG00000134160; TAA
VPLVGLVV

SEQ ID NO: 90956 - protein, 8 aa, Homo sapiens
  Table A; Target 90956; HLA-B*54:01; TRPM1; ENSG00000134160; TAA
VPLVGLVV

SEQ ID NO: 90957 - protein, 8 aa, Homo sapiens
  Table A; Target 90957; HLA-B*56:01; TRPM1; ENSG00000134160; TAA
VPLVGLVV

SEQ ID NO: 90958 - protein, 9 aa, Homo sapiens
  Table A; Target 90958; HLA-A*24:02; TRPM1; ENSG00000134160; TAA
VQAEHKEQF

SEQ ID NO: 90959 - protein, 9 aa, Homo sapiens
  Table A; Target 90959; HLA-A*32:01; TRPM1; ENSG00000134160; TAA
VQAEHKEQF

SEQ ID NO: 90960 - protein, 9 aa, Homo sapiens
  Table A; Target 90960; HLA-B*13:02; TRPM1; ENSG00000134160; TAA
VQAEHKEQF

SEQ ID NO: 90961 - protein, 9 aa, Homo sapiens
  Table A; Target 90961; HLA-B*15:01; TRPM1; ENSG00000134160; TAA
VQAEHKEQF

SEQ ID NO: 90962 - protein, 9 aa, Homo sapiens
  Table A; Target 90962; HLA-B*15:03; TRPM1; ENSG00000134160; TAA
VQAEHKEQF

SEQ ID NO: 90963 - protein, 9 aa, Homo sapiens
  Table A; Target 90963; HLA-B*18:01; TRPM1; ENSG00000134160; TAA
VQAEHKEQF

SEQ ID NO: 90964 - protein, 9 aa, Homo sapiens
  Table A; Target 90964; HLA-B*37:01; TRPM1; ENSG00000134160; TAA
VQAEHKEQF

SEQ ID NO: 90965 - protein, 9 aa, Homo sapiens
  Table A; Target 90965; HLA-B*38:01; TRPM1; ENSG00000134160; TAA
VQAEHKEQF

SEQ ID NO: 90966 - protein, 9 aa, Homo sapiens
  Table A; Target 90966; HLA-B*44:02; TRPM1; ENSG00000134160; TAA
VQAEHKEQF

SEQ ID NO: 90967 - protein, 9 aa, Homo sapiens
  Table A; Target 90967; HLA-B*44:03; TRPM1; ENSG00000134160; TAA
VQAEHKEQF

SEQ ID NO: 90968 - protein, 9 aa, Homo sapiens
  Table A; Target 90968; HLA-B*46:01; TRPM1; ENSG00000134160; TAA
VQAEHKEQF

SEQ ID NO: 90969 - protein, 9 aa, Homo sapiens
  Table A; Target 90969; HLA-B*58:01; TRPM1; ENSG00000134160; TAA
VQAEHKEQF

SEQ ID NO: 90970 - protein, 9 aa, Homo sapiens
  Table A; Target 90970; HLA-C*02:02; TRPM1; ENSG00000134160; TAA
VQAEHKEQF

SEQ ID NO: 90971 - protein, 9 aa, Homo sapiens
  Table A; Target 90971; HLA-C*07:04; TRPM1; ENSG00000134160; TAA
VQAEHKEQF

SEQ ID NO: 90972 - protein, 9 aa, Homo sapiens
  Table A; Target 90972; HLA-C*12:03; TRPM1; ENSG00000134160; TAA
VQAEHKEQF

SEQ ID NO: 90973 - protein, 9 aa, Homo sapiens
  Table A; Target 90973; HLA-C*14:02; TRPM1; ENSG00000134160; TAA
VQAEHKEQF

SEQ ID NO: 90974 - protein, 9 aa, Homo sapiens
  Table A; Target 90974; HLA-C*16:01; TRPM1; ENSG00000134160; TAA
VQAEHKEQF

SEQ ID NO: 90975 - protein, 9 aa, Homo sapiens
  Table A; Target 90975; HLA-C*16:02; TRPM1; ENSG00000134160; TAA
VQAEHKEQF

SEQ ID NO: 90976 - protein, 9 aa, Homo sapiens
  Table A; Target 90976; HLA-C*16:04; TRPM1; ENSG00000134160; TAA
VQAEHKEQF

SEQ ID NO: 90977 - protein, 8 aa, Homo sapiens
  Table A; Target 90977; HLA-B*13:02; TRPM1; ENSG00000134160; TAA
VQNTQLTV

SEQ ID NO: 90978 - protein, 9 aa, Homo sapiens
  Table A; Target 90978; HLA-A*01:01; TRPM1; ENSG00000134160; TAA
VSAPDQLSL

SEQ ID NO: 90979 - protein, 9 aa, Homo sapiens
  Table A; Target 90979; HLA-A*30:01; TRPM1; ENSG00000134160; TAA
VSAPDQLSL

SEQ ID NO: 90980 - protein, 9 aa, Homo sapiens
  Table A; Target 90980; HLA-B*39:01; TRPM1; ENSG00000134160; TAA
VSAPDQLSL

SEQ ID NO: 90981 - protein, 9 aa, Homo sapiens
  Table A; Target 90981; HLA-B*40:01; TRPM1; ENSG00000134160; TAA
VSAPDQLSL

SEQ ID NO: 90982 - protein, 9 aa, Homo sapiens
  Table A; Target 90982; HLA-B*57:01; TRPM1; ENSG00000134160; TAA
VSAPDQLSL

SEQ ID NO: 90983 - protein, 9 aa, Homo sapiens
  Table A; Target 90983; HLA-B*58:01; TRPM1; ENSG00000134160; TAA
VSAPDQLSL

SEQ ID NO: 90984 - protein, 9 aa, Homo sapiens
  Table A; Target 90984; HLA-C*01:02; TRPM1; ENSG00000134160; TAA
VSAPDQLSL

SEQ ID NO: 90985 - protein, 9 aa, Homo sapiens
  Table A; Target 90985; HLA-C*03:03; TRPM1; ENSG00000134160; TAA
VSAPDQLSL

SEQ ID NO: 90986 - protein, 9 aa, Homo sapiens
  Table A; Target 90986; HLA-C*03:04; TRPM1; ENSG00000134160; TAA
VSAPDQLSL

SEQ ID NO: 90987 - protein, 9 aa, Homo sapiens
  Table A; Target 90987; HLA-C*05:01; TRPM1; ENSG00000134160; TAA
VSAPDQLSL

SEQ ID NO: 90988 - protein, 9 aa, Homo sapiens
  Table A; Target 90988; HLA-C*16:01; TRPM1; ENSG00000134160; TAA
VSAPDQLSL

SEQ ID NO: 90989 - protein, 9 aa, Homo sapiens
  Table A; Target 90989; HLA-C*16:02; TRPM1; ENSG00000134160; TAA
VSAPDQLSL

SEQ ID NO: 90990 - protein, 9 aa, Homo sapiens
  Table A; Target 90990; HLA-C*16:04; TRPM1; ENSG00000134160; TAA
VSAPDQLSL

SEQ ID NO: 90991 - protein, 9 aa, Homo sapiens
  Table A; Target 90991; HLA-A*02:01; TRPM1; ENSG00000134160; TAA
VSTGVISHV

SEQ ID NO: 90992 - protein, 9 aa, Homo sapiens
  Table A; Target 90992; HLA-A*02:03; TRPM1; ENSG00000134160; TAA
VSTGVISHV

SEQ ID NO: 90993 - protein, 9 aa, Homo sapiens
  Table A; Target 90993; HLA-A*02:04; TRPM1; ENSG00000134160; TAA
VSTGVISHV

SEQ ID NO: 90994 - protein, 9 aa, Homo sapiens
  Table A; Target 90994; HLA-A*02:07; TRPM1; ENSG00000134160; TAA
VSTGVISHV

SEQ ID NO: 90995 - protein, 9 aa, Homo sapiens
  Table A; Target 90995; HLA-A*23:01; TRPM1; ENSG00000134160; TAA
VSTGVISHV

SEQ ID NO: 90996 - protein, 9 aa, Homo sapiens
  Table A; Target 90996; HLA-A*30:01; TRPM1; ENSG00000134160; TAA
VSTGVISHV

SEQ ID NO: 90997 - protein, 9 aa, Homo sapiens
  Table A; Target 90997; HLA-A*32:01; TRPM1; ENSG00000134160; TAA
VSTGVISHV

SEQ ID NO: 90998 - protein, 9 aa, Homo sapiens
  Table A; Target 90998; HLA-A*68:02; TRPM1; ENSG00000134160; TAA
VSTGVISHV

SEQ ID NO: 90999 - protein, 9 aa, Homo sapiens
  Table A; Target 90999; HLA-B*13:02; TRPM1; ENSG00000134160; TAA
VSTGVISHV

SEQ ID NO: 91000 - protein, 9 aa, Homo sapiens
  Table A; Target 91000; HLA-B*49:01; TRPM1; ENSG00000134160; TAA
VSTGVISHV

SEQ ID NO: 91001 - protein, 9 aa, Homo sapiens
  Table A; Target 91001; HLA-B*55:01; TRPM1; ENSG00000134160; TAA
VSTGVISHV

SEQ ID NO: 91002 - protein, 9 aa, Homo sapiens
  Table A; Target 91002; HLA-B*58:01; TRPM1; ENSG00000134160; TAA
VSTGVISHV

SEQ ID NO: 91003 - protein, 9 aa, Homo sapiens
  Table A; Target 91003; HLA-C*02:02; TRPM1; ENSG00000134160; TAA
VSTGVISHV

SEQ ID NO: 91004 - protein, 9 aa, Homo sapiens
  Table A; Target 91004; HLA-C*03:03; TRPM1; ENSG00000134160; TAA
VSTGVISHV

SEQ ID NO: 91005 - protein, 9 aa, Homo sapiens
  Table A; Target 91005; HLA-C*03:04; TRPM1; ENSG00000134160; TAA
VSTGVISHV

SEQ ID NO: 91006 - protein, 9 aa, Homo sapiens
  Table A; Target 91006; HLA-C*06:02; TRPM1; ENSG00000134160; TAA
VSTGVISHV

SEQ ID NO: 91007 - protein, 9 aa, Homo sapiens
  Table A; Target 91007; HLA-C*12:03; TRPM1; ENSG00000134160; TAA
VSTGVISHV

SEQ ID NO: 91008 - protein, 9 aa, Homo sapiens
  Table A; Target 91008; HLA-C*16:01; TRPM1; ENSG00000134160; TAA
VSTGVISHV

SEQ ID NO: 91009 - protein, 9 aa, Homo sapiens
  Table A; Target 91009; HLA-C*16:02; TRPM1; ENSG00000134160; TAA
VSTGVISHV

SEQ ID NO: 91010 - protein, 9 aa, Homo sapiens
  Table A; Target 91010; HLA-C*16:04; TRPM1; ENSG00000134160; TAA
VSTGVISHV

SEQ ID NO: 91011 - protein, 10 aa, Homo sapiens
  Table A; Target 91011; HLA-C*03:03; TRPM1; ENSG00000134160; TAA
VSYDTKPDSL

SEQ ID NO: 91012 - protein, 10 aa, Homo sapiens
  Table A; Target 91012; HLA-C*03:04; TRPM1; ENSG00000134160; TAA
VSYDTKPDSL

SEQ ID NO: 91013 - protein, 9 aa, Homo sapiens
  Table A; Target 91013; HLA-A*01:01; TRPM1; ENSG00000134160; TAA
VTIQKTFNY

SEQ ID NO: 91014 - protein, 9 aa, Homo sapiens
  Table A; Target 91014; HLA-A*03:01; TRPM1; ENSG00000134160; TAA
VTIQKTFNY

SEQ ID NO: 91015 - protein, 9 aa, Homo sapiens
  Table A; Target 91015; HLA-A*03:02; TRPM1; ENSG00000134160; TAA
VTIQKTFNY

SEQ ID NO: 91016 - protein, 9 aa, Homo sapiens
  Table A; Target 91016; HLA-A*11:01; TRPM1; ENSG00000134160; TAA
VTIQKTFNY

SEQ ID NO: 91017 - protein, 9 aa, Homo sapiens
  Table A; Target 91017; HLA-A*23:01; TRPM1; ENSG00000134160; TAA
VTIQKTFNY

SEQ ID NO: 91018 - protein, 9 aa, Homo sapiens
  Table A; Target 91018; HLA-A*24:02; TRPM1; ENSG00000134160; TAA
VTIQKTFNY

SEQ ID NO: 91019 - protein, 9 aa, Homo sapiens
  Table A; Target 91019; HLA-A*25:01; TRPM1; ENSG00000134160; TAA
VTIQKTFNY

SEQ ID NO: 91020 - protein, 9 aa, Homo sapiens
  Table A; Target 91020; HLA-A*26:01; TRPM1; ENSG00000134160; TAA
VTIQKTFNY

SEQ ID NO: 91021 - protein, 9 aa, Homo sapiens
  Table A; Target 91021; HLA-A*29:02; TRPM1; ENSG00000134160; TAA
VTIQKTFNY

SEQ ID NO: 91022 - protein, 9 aa, Homo sapiens
  Table A; Target 91022; HLA-A*30:02; TRPM1; ENSG00000134160; TAA
VTIQKTFNY

SEQ ID NO: 91023 - protein, 9 aa, Homo sapiens
  Table A; Target 91023; HLA-A*31:01; TRPM1; ENSG00000134160; TAA
VTIQKTFNY

SEQ ID NO: 91024 - protein, 9 aa, Homo sapiens
  Table A; Target 91024; HLA-A*32:01; TRPM1; ENSG00000134160; TAA
VTIQKTFNY

SEQ ID NO: 91025 - protein, 9 aa, Homo sapiens
  Table A; Target 91025; HLA-A*33:03; TRPM1; ENSG00000134160; TAA
VTIQKTFNY

SEQ ID NO: 91026 - protein, 9 aa, Homo sapiens
  Table A; Target 91026; HLA-B*15:01; TRPM1; ENSG00000134160; TAA
VTIQKTFNY

SEQ ID NO: 91027 - protein, 9 aa, Homo sapiens
  Table A; Target 91027; HLA-B*15:03; TRPM1; ENSG00000134160; TAA
VTIQKTFNY

SEQ ID NO: 91028 - protein, 9 aa, Homo sapiens
  Table A; Target 91028; HLA-B*44:03; TRPM1; ENSG00000134160; TAA
VTIQKTFNY

SEQ ID NO: 91029 - protein, 9 aa, Homo sapiens
  Table A; Target 91029; HLA-B*46:01; TRPM1; ENSG00000134160; TAA
VTIQKTFNY

SEQ ID NO: 91030 - protein, 9 aa, Homo sapiens
  Table A; Target 91030; HLA-B*57:01; TRPM1; ENSG00000134160; TAA
VTIQKTFNY

SEQ ID NO: 91031 - protein, 9 aa, Homo sapiens
  Table A; Target 91031; HLA-B*58:01; TRPM1; ENSG00000134160; TAA
VTIQKTFNY

SEQ ID NO: 91032 - protein, 9 aa, Homo sapiens
  Table A; Target 91032; HLA-C*01:02; TRPM1; ENSG00000134160; TAA
VTIQKTFNY

SEQ ID NO: 91033 - protein, 9 aa, Homo sapiens
  Table A; Target 91033; HLA-C*02:02; TRPM1; ENSG00000134160; TAA
VTIQKTFNY

SEQ ID NO: 91034 - protein, 9 aa, Homo sapiens
  Table A; Target 91034; HLA-C*07:01; TRPM1; ENSG00000134160; TAA
VTIQKTFNY

SEQ ID NO: 91035 - protein, 9 aa, Homo sapiens
  Table A; Target 91035; HLA-C*12:03; TRPM1; ENSG00000134160; TAA
VTIQKTFNY

SEQ ID NO: 91036 - protein, 9 aa, Homo sapiens
  Table A; Target 91036; HLA-C*14:02; TRPM1; ENSG00000134160; TAA
VTIQKTFNY

SEQ ID NO: 91037 - protein, 9 aa, Homo sapiens
  Table A; Target 91037; HLA-C*16:01; TRPM1; ENSG00000134160; TAA
VTIQKTFNY

SEQ ID NO: 91038 - protein, 9 aa, Homo sapiens
  Table A; Target 91038; HLA-C*16:02; TRPM1; ENSG00000134160; TAA
VTIQKTFNY

SEQ ID NO: 91039 - protein, 9 aa, Homo sapiens
  Table A; Target 91039; HLA-C*16:04; TRPM1; ENSG00000134160; TAA
VTIQKTFNY

SEQ ID NO: 91040 - protein, 11 aa, Homo sapiens
  Table A; Target 91040; HLA-A*11:01; TRPM1; ENSG00000134160; TAA
VTIQKTFNYNK

SEQ ID NO: 91041 - protein, 11 aa, Homo sapiens
  Table A; Target 91041; HLA-A*31:01; TRPM1; ENSG00000134160; TAA
VTIQKTFNYNK

SEQ ID NO: 91042 - protein, 8 aa, Homo sapiens
  Table A; Target 91042; HLA-B*08:01; TRPM1; ENSG00000134160; TAA
VTRVYQTM

SEQ ID NO: 91043 - protein, 8 aa, Homo sapiens
  Table A; Target 91043; HLA-B*46:01; TRPM1; ENSG00000134160; TAA
VTRVYQTM

SEQ ID NO: 91044 - protein, 9 aa, Homo sapiens
  Table A; Target 91044; HLA-A*26:01; TRPM1; ENSG00000134160; TAA
VTSERVENM

SEQ ID NO: 91045 - protein, 9 aa, Homo sapiens
  Table A; Target 91045; HLA-A*32:01; TRPM1; ENSG00000134160; TAA
VTSERVENM

SEQ ID NO: 91046 - protein, 9 aa, Homo sapiens
  Table A; Target 91046; HLA-B*37:01; TRPM1; ENSG00000134160; TAA
VTSERVENM

SEQ ID NO: 91047 - protein, 9 aa, Homo sapiens
  Table A; Target 91047; HLA-C*01:02; TRPM1; ENSG00000134160; TAA
VTSERVENM

SEQ ID NO: 91048 - protein, 9 aa, Homo sapiens
  Table A; Target 91048; HLA-C*02:02; TRPM1; ENSG00000134160; TAA
VTSERVENM

SEQ ID NO: 91049 - protein, 9 aa, Homo sapiens
  Table A; Target 91049; HLA-C*12:03; TRPM1; ENSG00000134160; TAA
VTSERVENM

SEQ ID NO: 91050 - protein, 9 aa, Homo sapiens
  Table A; Target 91050; HLA-C*14:02; TRPM1; ENSG00000134160; TAA
VTSERVENM

SEQ ID NO: 91051 - protein, 9 aa, Homo sapiens
  Table A; Target 91051; HLA-C*16:01; TRPM1; ENSG00000134160; TAA
VTSERVENM

SEQ ID NO: 91052 - protein, 9 aa, Homo sapiens
  Table A; Target 91052; HLA-C*16:02; TRPM1; ENSG00000134160; TAA
VTSERVENM

SEQ ID NO: 91053 - protein, 8 aa, Homo sapiens
  Table A; Target 91053; HLA-C*05:01; TRPM1; ENSG00000134160; TAA
VVEGGPNV

SEQ ID NO: 91054 - protein, 9 aa, Homo sapiens
  Table A; Target 91054; HLA-A*01:01; TRPM1; ENSG00000134160; TAA
VVEGGPNVV

SEQ ID NO: 91055 - protein, 9 aa, Homo sapiens
  Table A; Target 91055; HLA-B*39:01; TRPM1; ENSG00000134160; TAA
VVEGGPNVV

SEQ ID NO: 91056 - protein, 9 aa, Homo sapiens
  Table A; Target 91056; HLA-C*05:01; TRPM1; ENSG00000134160; TAA
VVEGGPNVV

SEQ ID NO: 91057 - protein, 9 aa, Homo sapiens
  Table A; Target 91057; HLA-C*12:03; TRPM1; ENSG00000134160; TAA
VVEGGPNVV

SEQ ID NO: 91058 - protein, 9 aa, Homo sapiens
  Table A; Target 91058; HLA-C*12:03; TRPM1; ENSG00000134160; TAA
VVIMLVVLM

SEQ ID NO: 91059 - protein, 10 aa, Homo sapiens
  Table A; Target 91059; HLA-A*31:01; TRPM1; ENSG00000134160; TAA
VVLMSFGVAR

SEQ ID NO: 91060 - protein, 10 aa, Homo sapiens
  Table A; Target 91060; HLA-A*33:01; TRPM1; ENSG00000134160; TAA
VVLMSFGVAR

SEQ ID NO: 91061 - protein, 8 aa, Homo sapiens
  Table A; Target 91061; HLA-A*29:02; TRPM1; ENSG00000134160; TAA
VVSIVLEY

SEQ ID NO: 91062 - protein, 9 aa, Homo sapiens
  Table A; Target 91062; HLA-A*68:02; TRPM1; ENSG00000134160; TAA
VVSIVLEYL

SEQ ID NO: 91063 - protein, 8 aa, Homo sapiens
  Table A; Target 91063; HLA-C*14:02; TRPM1; ENSG00000134160; TAA
VYQTMSNP

SEQ ID NO: 91064 - protein, 9 aa, Homo sapiens
  Table A; Target 91064; HLA-A*23:01; TRPM1; ENSG00000134160; TAA
VYQTMSNPL

SEQ ID NO: 91065 - protein, 9 aa, Homo sapiens
  Table A; Target 91065; HLA-A*24:02; TRPM1; ENSG00000134160; TAA
VYQTMSNPL

SEQ ID NO: 91066 - protein, 9 aa, Homo sapiens
  Table A; Target 91066; HLA-B*07:02; TRPM1; ENSG00000134160; TAA
VYQTMSNPL

SEQ ID NO: 91067 - protein, 9 aa, Homo sapiens
  Table A; Target 91067; HLA-C*01:02; TRPM1; ENSG00000134160; TAA
VYQTMSNPL

SEQ ID NO: 91068 - protein, 9 aa, Homo sapiens
  Table A; Target 91068; HLA-C*04:01; TRPM1; ENSG00000134160; TAA
VYQTMSNPL

SEQ ID NO: 91069 - protein, 9 aa, Homo sapiens
  Table A; Target 91069; HLA-C*06:02; TRPM1; ENSG00000134160; TAA
VYQTMSNPL

SEQ ID NO: 91070 - protein, 9 aa, Homo sapiens
  Table A; Target 91070; HLA-C*07:02; TRPM1; ENSG00000134160; TAA
VYQTMSNPL

SEQ ID NO: 91071 - protein, 9 aa, Homo sapiens
  Table A; Target 91071; HLA-C*07:04; TRPM1; ENSG00000134160; TAA
VYQTMSNPL

SEQ ID NO: 91072 - protein, 9 aa, Homo sapiens
  Table A; Target 91072; HLA-C*14:02; TRPM1; ENSG00000134160; TAA
VYQTMSNPL

SEQ ID NO: 91073 - protein, 9 aa, Homo sapiens
  Table A; Target 91073; HLA-C*16:01; TRPM1; ENSG00000134160; TAA
VYQTMSNPL

SEQ ID NO: 91074 - protein, 9 aa, Homo sapiens
  Table A; Target 91074; HLA-C*16:02; TRPM1; ENSG00000134160; TAA
VYQTMSNPL

SEQ ID NO: 91075 - protein, 10 aa, Homo sapiens
  Table A; Target 91075; HLA-A*29:02; TRPM1; ENSG00000134160; TAA
WFYTISYLGY

SEQ ID NO: 91076 - protein, 9 aa, Homo sapiens
  Table A; Target 91076; HLA-C*07:04; TRPM1; ENSG00000134160; TAA
WVNALEQAM

SEQ ID NO: 91077 - protein, 9 aa, Homo sapiens
  Table A; Target 91077; HLA-B*54:01; TRPM1; ENSG00000134160; TAA
YAMEINPPC

SEQ ID NO: 91078 - protein, 9 aa, Homo sapiens
  Table A; Target 91078; HLA-C*02:02; TRPM1; ENSG00000134160; TAA
YAMEINPPC

SEQ ID NO: 91079 - protein, 9 aa, Homo sapiens
  Table A; Target 91079; HLA-C*12:03; TRPM1; ENSG00000134160; TAA
YAMEINPPC

SEQ ID NO: 91080 - protein, 10 aa, Homo sapiens
  Table A; Target 91080; HLA-B*27:02; TRPM1; ENSG00000134160; TAA
YDDFSYQTSK

SEQ ID NO: 91081 - protein, 8 aa, Homo sapiens
  Table A; Target 91081; HLA-B*37:01; TRPM1; ENSG00000134160; TAA
YDEEGKRL

SEQ ID NO: 91082 - protein, 8 aa, Homo sapiens
  Table A; Target 91082; HLA-A*30:01; TRPM1; ENSG00000134160; TAA
YDTKPDSL

SEQ ID NO: 91083 - protein, 8 aa, Homo sapiens
  Table A; Target 91083; HLA-B*37:01; TRPM1; ENSG00000134160; TAA
YDTKPDSL

SEQ ID NO: 91084 - protein, 9 aa, Homo sapiens
  Table A; Target 91084; HLA-B*38:01; TRPM1; ENSG00000134160; TAA
YDTKPDSLL

SEQ ID NO: 91085 - protein, 9 aa, Homo sapiens
  Table A; Target 91085; HLA-B*40:02; TRPM1; ENSG00000134160; TAA
YDTKPDSLL

SEQ ID NO: 91086 - protein, 9 aa, Homo sapiens
  Table A; Target 91086; HLA-C*14:02; TRPM1; ENSG00000134160; TAA
YFPDETINA

SEQ ID NO: 91087 - protein, 10 aa, Homo sapiens
  Table A; Target 91087; HLA-C*14:02; TRPM1; ENSG00000134160; TAA
YFPDETINAC

SEQ ID NO: 91088 - protein, 11 aa, Homo sapiens
  Table A; Target 91088; HLA-A*23:01; TRPM1; ENSG00000134160; TAA
YFPDETINACK

SEQ ID NO: 91089 - protein, 11 aa, Homo sapiens
  Table A; Target 91089; HLA-A*29:02; TRPM1; ENSG00000134160; TAA
YFPDETINACK

SEQ ID NO: 91090 - protein, 8 aa, Homo sapiens
  Table A; Target 91090; HLA-B*38:01; TRPM1; ENSG00000134160; TAA
YHFNGEEL

SEQ ID NO: 91091 - protein, 8 aa, Homo sapiens
  Table A; Target 91091; HLA-B*39:01; TRPM1; ENSG00000134160; TAA
YHFNGEEL

SEQ ID NO: 91092 - protein, 8 aa, Homo sapiens
  Table A; Target 91092; HLA-C*03:03; TRPM1; ENSG00000134160; TAA
YHFNGEEL

SEQ ID NO: 91093 - protein, 8 aa, Homo sapiens
  Table A; Target 91093; HLA-C*03:04; TRPM1; ENSG00000134160; TAA
YHFNGEEL

SEQ ID NO: 91094 - protein, 9 aa, Homo sapiens
  Table A; Target 91094; HLA-A*68:02; TRPM1; ENSG00000134160; TAA
YHFNGEELL

SEQ ID NO: 91095 - protein, 9 aa, Homo sapiens
  Table A; Target 91095; HLA-B*38:01; TRPM1; ENSG00000134160; TAA
YHFNGEELL

SEQ ID NO: 91096 - protein, 9 aa, Homo sapiens
  Table A; Target 91096; HLA-B*39:01; TRPM1; ENSG00000134160; TAA
YHFNGEELL

SEQ ID NO: 91097 - protein, 10 aa, Homo sapiens
  Table A; Target 91097; HLA-B*38:01; TRPM1; ENSG00000134160; TAA
YHFNGEELLF

SEQ ID NO: 91098 - protein, 9 aa, Homo sapiens
  Table A; Target 91098; HLA-B*27:02; TRPM1; ENSG00000134160; TAA
YIVSLALEK

SEQ ID NO: 91099 - protein, 9 aa, Homo sapiens
  Table A; Target 91099; HLA-B*15:03; TRPM1; ENSG00000134160; TAA
YKHDEQIAM

SEQ ID NO: 91100 - protein, 9 aa, Homo sapiens
  Table A; Target 91100; HLA-C*03:03; TRPM1; ENSG00000134160; TAA
YKHDEQIAM

SEQ ID NO: 91101 - protein, 9 aa, Homo sapiens
  Table A; Target 91101; HLA-A*02:01; TRPM1; ENSG00000134160; TAA
YLGPYVMMI

SEQ ID NO: 91102 - protein, 9 aa, Homo sapiens
  Table A; Target 91102; HLA-A*02:03; TRPM1; ENSG00000134160; TAA
YLGPYVMMI

SEQ ID NO: 91103 - protein, 9 aa, Homo sapiens
  Table A; Target 91103; HLA-A*02:04; TRPM1; ENSG00000134160; TAA
YLGPYVMMI

SEQ ID NO: 91104 - protein, 9 aa, Homo sapiens
  Table A; Target 91104; HLA-A*02:07; TRPM1; ENSG00000134160; TAA
YLGPYVMMI

SEQ ID NO: 91105 - protein, 9 aa, Homo sapiens
  Table A; Target 91105; HLA-A*24:02; TRPM1; ENSG00000134160; TAA
YLGPYVMMI

SEQ ID NO: 91106 - protein, 9 aa, Homo sapiens
  Table A; Target 91106; HLA-B*13:02; TRPM1; ENSG00000134160; TAA
YLGPYVMMI

SEQ ID NO: 91107 - protein, 11 aa, Homo sapiens
  Table A; Target 91107; HLA-A*02:01; TRPM1; ENSG00000134160; TAA
YLLRQSSINSA

SEQ ID NO: 91108 - protein, 9 aa, Homo sapiens
  Table A; Target 91108; HLA-A*02:01; TRPM1; ENSG00000134160; TAA
YLLVANILL

SEQ ID NO: 91109 - protein, 9 aa, Homo sapiens
  Table A; Target 91109; HLA-A*02:04; TRPM1; ENSG00000134160; TAA
YLLVANILL

SEQ ID NO: 91110 - protein, 9 aa, Homo sapiens
  Table A; Target 91110; HLA-A*02:07; TRPM1; ENSG00000134160; TAA
YLLVANILL

SEQ ID NO: 91111 - protein, 11 aa, Homo sapiens
  Table A; Target 91111; HLA-A*29:02; TRPM1; ENSG00000134160; TAA
YLMGGAYRCNY

SEQ ID NO: 91112 - protein, 10 aa, Homo sapiens
  Table A; Target 91112; HLA-A*01:01; TRPM1; ENSG00000134160; TAA
YLQEEPPIPV

SEQ ID NO: 91113 - protein, 10 aa, Homo sapiens
  Table A; Target 91113; HLA-A*02:01; TRPM1; ENSG00000134160; TAA
YLQEEPPIPV

SEQ ID NO: 91114 - protein, 10 aa, Homo sapiens
  Table A; Target 91114; HLA-A*02:03; TRPM1; ENSG00000134160; TAA
YLQEEPPIPV

SEQ ID NO: 91115 - protein, 10 aa, Homo sapiens
  Table A; Target 91115; HLA-A*02:04; TRPM1; ENSG00000134160; TAA
YLQEEPPIPV

SEQ ID NO: 91116 - protein, 10 aa, Homo sapiens
  Table A; Target 91116; HLA-A*02:07; TRPM1; ENSG00000134160; TAA
YLQEEPPIPV

SEQ ID NO: 91117 - protein, 11 aa, Homo sapiens
  Table A; Target 91117; HLA-A*02:01; TRPM1; ENSG00000134160; TAA
YLQEEPPIPVV

SEQ ID NO: 91118 - protein, 11 aa, Homo sapiens
  Table A; Target 91118; HLA-A*02:03; TRPM1; ENSG00000134160; TAA
YLQEEPPIPVV

SEQ ID NO: 91119 - protein, 11 aa, Homo sapiens
  Table A; Target 91119; HLA-A*02:04; TRPM1; ENSG00000134160; TAA
YLQEEPPIPVV

SEQ ID NO: 91120 - protein, 9 aa, Homo sapiens
  Table A; Target 91120; HLA-A*29:02; TRPM1; ENSG00000134160; TAA
YMGYGRVIY

SEQ ID NO: 91121 - protein, 9 aa, Homo sapiens
  Table A; Target 91121; HLA-B*57:01; TRPM1; ENSG00000134160; TAA
YNAPIVKFW

SEQ ID NO: 91122 - protein, 9 aa, Homo sapiens
  Table A; Target 91122; HLA-B*08:01; TRPM1; ENSG00000134160; TAA
YNKAQSHQL

SEQ ID NO: 91123 - protein, 9 aa, Homo sapiens
  Table A; Target 91123; HLA-B*40:02; TRPM1; ENSG00000134160; TAA
YNKAQSHQL

SEQ ID NO: 91124 - protein, 9 aa, Homo sapiens
  Table A; Target 91124; HLA-C*07:02; TRPM1; ENSG00000134160; TAA
YNKAQSHQL

SEQ ID NO: 91125 - protein, 9 aa, Homo sapiens
  Table A; Target 91125; HLA-C*16:02; TRPM1; ENSG00000134160; TAA
YNKAQSHQL

SEQ ID NO: 91126 - protein, 10 aa, Homo sapiens
  Table A; Target 91126; HLA-A*33:01; TRPM1; ENSG00000134160; TAA
YNKAQSHQLF

SEQ ID NO: 91127 - protein, 9 aa, Homo sapiens
  Table A; Target 91127; HLA-A*33:01; TRPM1; ENSG00000134160; TAA
YNNLFGPKR

SEQ ID NO: 91128 - protein, 8 aa, Homo sapiens
  Table A; Target 91128; HLA-B*51:01; TRPM1; ENSG00000134160; TAA
YPFHELMV

SEQ ID NO: 91129 - protein, 8 aa, Homo sapiens
  Table A; Target 91129; HLA-B*54:01; TRPM1; ENSG00000134160; TAA
YPFHELMV

SEQ ID NO: 91130 - protein, 9 aa, Homo sapiens
  Table A; Target 91130; HLA-B*54:01; TRPM1; ENSG00000134160; TAA
YPFHELMVW

SEQ ID NO: 91131 - protein, 10 aa, Homo sapiens
  Table A; Target 91131; HLA-B*54:01; TRPM1; ENSG00000134160; TAA
YPFHELMVWA

SEQ ID NO: 91132 - protein, 8 aa, Homo sapiens
  Table A; Target 91132; HLA-B*08:01; TRPM1; ENSG00000134160; TAA
YPLEETKI

SEQ ID NO: 91133 - protein, 8 aa, Homo sapiens
  Table A; Target 91133; HLA-B*35:03; TRPM1; ENSG00000134160; TAA
YPLEETKI

SEQ ID NO: 91134 - protein, 8 aa, Homo sapiens
  Table A; Target 91134; HLA-B*51:01; TRPM1; ENSG00000134160; TAA
YPLEETKI

SEQ ID NO: 91135 - protein, 10 aa, Homo sapiens
  Table A; Target 91135; HLA-A*33:03; TRPM1; ENSG00000134160; TAA
YPLEETKITR

SEQ ID NO: 91136 - protein, 10 aa, Homo sapiens
  Table A; Target 91136; HLA-A*68:01; TRPM1; ENSG00000134160; TAA
YPLEETKITR

SEQ ID NO: 91137 - protein, 10 aa, Homo sapiens
  Table A; Target 91137; HLA-B*35:01; TRPM1; ENSG00000134160; TAA
YPLEETKITR

SEQ ID NO: 91138 - protein, 10 aa, Homo sapiens
  Table A; Target 91138; HLA-B*35:03; TRPM1; ENSG00000134160; TAA
YPLEETKITR

SEQ ID NO: 91139 - protein, 10 aa, Homo sapiens
  Table A; Target 91139; HLA-B*54:01; TRPM1; ENSG00000134160; TAA
YPLEETKITR

SEQ ID NO: 91140 - protein, 10 aa, Homo sapiens
  Table A; Target 91140; HLA-B*56:01; TRPM1; ENSG00000134160; TAA
YPLEETKITR

SEQ ID NO: 91141 - protein, 10 aa, Homo sapiens
  Table A; Target 91141; HLA-C*07:06; TRPM1; ENSG00000134160; TAA
YPLEETKITR

SEQ ID NO: 91142 - protein, 11 aa, Homo sapiens
  Table A; Target 91142; HLA-A*01:01; TRPM1; ENSG00000134160; TAA
YPLEETKITRY

SEQ ID NO: 91143 - protein, 11 aa, Homo sapiens
  Table A; Target 91143; HLA-A*26:01; TRPM1; ENSG00000134160; TAA
YPLEETKITRY

SEQ ID NO: 91144 - protein, 11 aa, Homo sapiens
  Table A; Target 91144; HLA-A*29:02; TRPM1; ENSG00000134160; TAA
YPLEETKITRY

SEQ ID NO: 91145 - protein, 11 aa, Homo sapiens
  Table A; Target 91145; HLA-A*30:02; TRPM1; ENSG00000134160; TAA
YPLEETKITRY

SEQ ID NO: 91146 - protein, 11 aa, Homo sapiens
  Table A; Target 91146; HLA-B*35:01; TRPM1; ENSG00000134160; TAA
YPLEETKITRY

SEQ ID NO: 91147 - protein, 11 aa, Homo sapiens
  Table A; Target 91147; HLA-B*55:01; TRPM1; ENSG00000134160; TAA
YPLEETKITRY

SEQ ID NO: 91148 - protein, 8 aa, Homo sapiens
  Table A; Target 91148; HLA-B*35:01; TRPM1; ENSG00000134160; TAA
YPTDSYGV

SEQ ID NO: 91149 - protein, 8 aa, Homo sapiens
  Table A; Target 91149; HLA-B*35:03; TRPM1; ENSG00000134160; TAA
YPTDSYGV

SEQ ID NO: 91150 - protein, 8 aa, Homo sapiens
  Table A; Target 91150; HLA-B*51:01; TRPM1; ENSG00000134160; TAA
YPTDSYGV

SEQ ID NO: 91151 - protein, 8 aa, Homo sapiens
  Table A; Target 91151; HLA-B*54:01; TRPM1; ENSG00000134160; TAA
YPTDSYGV

SEQ ID NO: 91152 - protein, 8 aa, Homo sapiens
  Table A; Target 91152; HLA-B*55:01; TRPM1; ENSG00000134160; TAA
YPTDSYGV

SEQ ID NO: 91153 - protein, 8 aa, Homo sapiens
  Table A; Target 91153; HLA-B*56:01; TRPM1; ENSG00000134160; TAA
YPTDSYGV

SEQ ID NO: 91154 - protein, 9 aa, Homo sapiens
  Table A; Target 91154; HLA-A*25:01; TRPM1; ENSG00000134160; TAA
YPTDSYGVL

SEQ ID NO: 91155 - protein, 9 aa, Homo sapiens
  Table A; Target 91155; HLA-B*07:02; TRPM1; ENSG00000134160; TAA
YPTDSYGVL

SEQ ID NO: 91156 - protein, 9 aa, Homo sapiens
  Table A; Target 91156; HLA-B*35:01; TRPM1; ENSG00000134160; TAA
YPTDSYGVL

SEQ ID NO: 91157 - protein, 9 aa, Homo sapiens
  Table A; Target 91157; HLA-B*35:03; TRPM1; ENSG00000134160; TAA
YPTDSYGVL

SEQ ID NO: 91158 - protein, 9 aa, Homo sapiens
  Table A; Target 91158; HLA-B*39:01; TRPM1; ENSG00000134160; TAA
YPTDSYGVL

SEQ ID NO: 91159 - protein, 9 aa, Homo sapiens
  Table A; Target 91159; HLA-B*51:01; TRPM1; ENSG00000134160; TAA
YPTDSYGVL

SEQ ID NO: 91160 - protein, 9 aa, Homo sapiens
  Table A; Target 91160; HLA-B*54:01; TRPM1; ENSG00000134160; TAA
YPTDSYGVL

SEQ ID NO: 91161 - protein, 9 aa, Homo sapiens
  Table A; Target 91161; HLA-B*55:01; TRPM1; ENSG00000134160; TAA
YPTDSYGVL

SEQ ID NO: 91162 - protein, 9 aa, Homo sapiens
  Table A; Target 91162; HLA-B*56:01; TRPM1; ENSG00000134160; TAA
YPTDSYGVL

SEQ ID NO: 91163 - protein, 9 aa, Homo sapiens
  Table A; Target 91163; HLA-C*01:02; TRPM1; ENSG00000134160; TAA
YPTDSYGVL

SEQ ID NO: 91164 - protein, 9 aa, Homo sapiens
  Table A; Target 91164; HLA-C*03:03; TRPM1; ENSG00000134160; TAA
YPTDSYGVL

SEQ ID NO: 91165 - protein, 9 aa, Homo sapiens
  Table A; Target 91165; HLA-C*03:04; TRPM1; ENSG00000134160; TAA
YPTDSYGVL

SEQ ID NO: 91166 - protein, 9 aa, Homo sapiens
  Table A; Target 91166; HLA-C*05:01; TRPM1; ENSG00000134160; TAA
YPTDSYGVL

SEQ ID NO: 91167 - protein, 9 aa, Homo sapiens
  Table A; Target 91167; HLA-C*07:02; TRPM1; ENSG00000134160; TAA
YPTDSYGVL

SEQ ID NO: 91168 - protein, 9 aa, Homo sapiens
  Table A; Target 91168; HLA-C*14:02; TRPM1; ENSG00000134160; TAA
YPTDSYGVL

SEQ ID NO: 91169 - protein, 11 aa, Homo sapiens
  Table A; Target 91169; HLA-B*27:02; TRPM1; ENSG00000134160; TAA
YPTDSYGVLEF

SEQ ID NO: 91170 - protein, 11 aa, Homo sapiens
  Table A; Target 91170; HLA-B*35:01; TRPM1; ENSG00000134160; TAA
YPTDSYGVLEF

SEQ ID NO: 91171 - protein, 11 aa, Homo sapiens
  Table A; Target 91171; HLA-B*35:03; TRPM1; ENSG00000134160; TAA
YPTDSYGVLEF

SEQ ID NO: 91172 - protein, 11 aa, Homo sapiens
  Table A; Target 91172; HLA-B*54:01; TRPM1; ENSG00000134160; TAA
YPTDSYGVLEF

SEQ ID NO: 91173 - protein, 8 aa, Homo sapiens
  Table A; Target 91173; HLA-B*39:01; TRPM1; ENSG00000134160; TAA
YQTMSNPL

SEQ ID NO: 91174 - protein, 8 aa, Homo sapiens
  Table A; Target 91174; HLA-C*07:04; TRPM1; ENSG00000134160; TAA
YQTMSNPL

SEQ ID NO: 91175 - protein, 9 aa, Homo sapiens
  Table A; Target 91175; HLA-B*27:05; TRPM1; ENSG00000134160; TAA
YQTMSNPLS

SEQ ID NO: 91176 - protein, 10 aa, Homo sapiens
  Table A; Target 91176; HLA-B*27:02; TRPM1; ENSG00000134160; TAA
YQTMSNPLSK

SEQ ID NO: 91177 - protein, 8 aa, Homo sapiens
  Table A; Target 91177; HLA-B*51:01; TRPM1; ENSG00000134160; TAA
YSNKAMYI

SEQ ID NO: 91178 - protein, 9 aa, Homo sapiens
  Table A; Target 91178; HLA-B*27:05; TRPM1; ENSG00000134160; TAA
YSSITDQQL

SEQ ID NO: 91179 - protein, 9 aa, Homo sapiens
  Table A; Target 91179; HLA-B*35:03; TRPM1; ENSG00000134160; TAA
YSSITDQQL

SEQ ID NO: 91180 - protein, 9 aa, Homo sapiens
  Table A; Target 91180; HLA-B*38:01; TRPM1; ENSG00000134160; TAA
YSSITDQQL

SEQ ID NO: 91181 - protein, 9 aa, Homo sapiens
  Table A; Target 91181; HLA-B*58:01; TRPM1; ENSG00000134160; TAA
YSSITDQQL

SEQ ID NO: 91182 - protein, 9 aa, Homo sapiens
  Table A; Target 91182; HLA-C*05:01; TRPM1; ENSG00000134160; TAA
YSSITDQQL

SEQ ID NO: 91183 - protein, 9 aa, Homo sapiens
  Table A; Target 91183; HLA-C*07:04; TRPM1; ENSG00000134160; TAA
YSSITDQQL

SEQ ID NO: 91184 - protein, 8 aa, Homo sapiens
  Table A; Target 91184; HLA-A*01:01; TRPM1; ENSG00000134160; TAA
YTISYLGY

SEQ ID NO: 91185 - protein, 8 aa, Homo sapiens
  Table A; Target 91185; HLA-A*26:01; TRPM1; ENSG00000134160; TAA
YTISYLGY

SEQ ID NO: 91186 - protein, 9 aa, Homo sapiens
  Table A; Target 91186; HLA-A*68:02; TRPM1; ENSG00000134160; TAA
YTISYLGYL

SEQ ID NO: 91187 - protein, 10 aa, Homo sapiens
  Table A; Target 91187; HLA-A*68:02; TRPM1; ENSG00000134160; TAA
YTISYLGYLL

SEQ ID NO: 91188 - protein, 9 aa, Homo sapiens
  Table A; Target 91188; HLA-A*24:02; TRPM1; ENSG00000134160; TAA
YWMIYGEVF

SEQ ID NO: 91189 - protein, 8 aa, Homo sapiens
  Table A; Target 91189; HLA-B*37:01; TSPAN10; ENSG00000182612; TAA
AAQRVVYL

SEQ ID NO: 91190 - protein, 8 aa, Homo sapiens
  Table A; Target 91190; HLA-C*12:03; TSPAN10; ENSG00000182612; TAA
AAQRVVYL

SEQ ID NO: 91191 - protein, 8 aa, Homo sapiens
  Table A; Target 91191; HLA-C*16:02; TSPAN10; ENSG00000182612; TAA
AAQRVVYL

SEQ ID NO: 91192 - protein, 8 aa, Homo sapiens
  Table A; Target 91192; HLA-B*07:02; TSPAN10; ENSG00000182612; TAA
AARLLGAL

SEQ ID NO: 91193 - protein, 8 aa, Homo sapiens
  Table A; Target 91193; HLA-B*08:01; TSPAN10; ENSG00000182612; TAA
AARLLGAL

SEQ ID NO: 91194 - protein, 8 aa, Homo sapiens
  Table A; Target 91194; HLA-B*46:01; TSPAN10; ENSG00000182612; TAA
AARLLGAL

SEQ ID NO: 91195 - protein, 8 aa, Homo sapiens
  Table A; Target 91195; HLA-C*07:02; TSPAN10; ENSG00000182612; TAA
AARLLGAL

SEQ ID NO: 91196 - protein, 9 aa, Homo sapiens
  Table A; Target 91196; HLA-B*54:01; TSPAN10; ENSG00000182612; TAA
AARLLGALA

SEQ ID NO: 91197 - protein, 9 aa, Homo sapiens
  Table A; Target 91197; HLA-B*56:01; TSPAN10; ENSG00000182612; TAA
AARLLGALA

SEQ ID NO: 91198 - protein, 9 aa, Homo sapiens
  Table A; Target 91198; HLA-C*06:02; TSPAN10; ENSG00000182612; TAA
AARLLGALA

SEQ ID NO: 91199 - protein, 10 aa, Homo sapiens
  Table A; Target 91199; HLA-B*54:01; TSPAN10; ENSG00000182612; TAA
AARLLGALAA

SEQ ID NO: 91200 - protein, 10 aa, Homo sapiens
  Table A; Target 91200; HLA-B*56:01; TSPAN10; ENSG00000182612; TAA
AARLLGALAA

SEQ ID NO: 91201 - protein, 10 aa, Homo sapiens
  Table A; Target 91201; HLA-C*06:02; TSPAN10; ENSG00000182612; TAA
AARLLGALAA

SEQ ID NO: 91202 - protein, 11 aa, Homo sapiens
  Table A; Target 91202; HLA-A*31:01; TSPAN10; ENSG00000182612; TAA
AARLLGALAAR

SEQ ID NO: 91203 - protein, 11 aa, Homo sapiens
  Table A; Target 91203; HLA-A*33:01; TSPAN10; ENSG00000182612; TAA
AARLLGALAAR

SEQ ID NO: 91204 - protein, 11 aa, Homo sapiens
  Table A; Target 91204; HLA-A*33:03; TSPAN10; ENSG00000182612; TAA
AARLLGALAAR

SEQ ID NO: 91205 - protein, 11 aa, Homo sapiens
  Table A; Target 91205; HLA-B*57:01; TSPAN10; ENSG00000182612; TAA
AARLLGALAAR

SEQ ID NO: 91206 - protein, 8 aa, Homo sapiens
  Table A; Target 91206; HLA-A*30:02; TSPAN10; ENSG00000182612; TAA
AARSGAAY

SEQ ID NO: 91207 - protein, 8 aa, Homo sapiens
  Table A; Target 91207; HLA-A*32:01; TSPAN10; ENSG00000182612; TAA
AARSGAAY

SEQ ID NO: 91208 - protein, 8 aa, Homo sapiens
  Table A; Target 91208; HLA-B*07:02; TSPAN10; ENSG00000182612; TAA
AARSGAAY

SEQ ID NO: 91209 - protein, 8 aa, Homo sapiens
  Table A; Target 91209; HLA-B*15:01; TSPAN10; ENSG00000182612; TAA
AARSGAAY

SEQ ID NO: 91210 - protein, 8 aa, Homo sapiens
  Table A; Target 91210; HLA-B*15:03; TSPAN10; ENSG00000182612; TAA
AARSGAAY

SEQ ID NO: 91211 - protein, 8 aa, Homo sapiens
  Table A; Target 91211; HLA-B*46:01; TSPAN10; ENSG00000182612; TAA
AARSGAAY

SEQ ID NO: 91212 - protein, 8 aa, Homo sapiens
  Table A; Target 91212; HLA-C*01:02; TSPAN10; ENSG00000182612; TAA
AARSGAAY

SEQ ID NO: 91213 - protein, 8 aa, Homo sapiens
  Table A; Target 91213; HLA-C*02:02; TSPAN10; ENSG00000182612; TAA
AARSGAAY

SEQ ID NO: 91214 - protein, 8 aa, Homo sapiens
  Table A; Target 91214; HLA-C*03:04; TSPAN10; ENSG00000182612; TAA
AARSGAAY

SEQ ID NO: 91215 - protein, 8 aa, Homo sapiens
  Table A; Target 91215; HLA-C*14:02; TSPAN10; ENSG00000182612; TAA
AARSGAAY

SEQ ID NO: 91216 - protein, 8 aa, Homo sapiens
  Table A; Target 91216; HLA-C*16:01; TSPAN10; ENSG00000182612; TAA
AARSGAAY

SEQ ID NO: 91217 - protein, 10 aa, Homo sapiens
  Table A; Target 91217; HLA-C*06:02; TSPAN10; ENSG00000182612; TAA
AARSGAAYGP

SEQ ID NO: 91218 - protein, 10 aa, Homo sapiens
  Table A; Target 91218; HLA-C*07:02; TSPAN10; ENSG00000182612; TAA
AARSGAAYGP

SEQ ID NO: 91219 - protein, 8 aa, Homo sapiens
  Table A; Target 91219; HLA-B*13:02; TSPAN10; ENSG00000182612; TAA
AASGGYAI

SEQ ID NO: 91220 - protein, 8 aa, Homo sapiens
  Table A; Target 91220; HLA-B*37:01; TSPAN10; ENSG00000182612; TAA
AASGGYAI

SEQ ID NO: 91221 - protein, 8 aa, Homo sapiens
  Table A; Target 91221; HLA-B*39:01; TSPAN10; ENSG00000182612; TAA
AASGGYAI

SEQ ID NO: 91222 - protein, 8 aa, Homo sapiens
  Table A; Target 91222; HLA-B*58:01; TSPAN10; ENSG00000182612; TAA
AASGGYAI

SEQ ID NO: 91223 - protein, 8 aa, Homo sapiens
  Table A; Target 91223; HLA-C*03:03; TSPAN10; ENSG00000182612; TAA
AASGGYAI

SEQ ID NO: 91224 - protein, 8 aa, Homo sapiens
  Table A; Target 91224; HLA-C*03:04; TSPAN10; ENSG00000182612; TAA
AASGGYAI

SEQ ID NO: 91225 - protein, 8 aa, Homo sapiens
  Table A; Target 91225; HLA-C*16:01; TSPAN10; ENSG00000182612; TAA
AASGGYAI

SEQ ID NO: 91226 - protein, 8 aa, Homo sapiens
  Table A; Target 91226; HLA-C*16:02; TSPAN10; ENSG00000182612; TAA
AASGGYAI

SEQ ID NO: 91227 - protein, 8 aa, Homo sapiens
  Table A; Target 91227; HLA-C*16:04; TSPAN10; ENSG00000182612; TAA
AASGGYAI

SEQ ID NO: 91228 - protein, 9 aa, Homo sapiens
  Table A; Target 91228; HLA-B*56:01; TSPAN10; ENSG00000182612; TAA
AASGGYAIA

SEQ ID NO: 91229 - protein, 10 aa, Homo sapiens
  Table A; Target 91229; HLA-A*11:01; TSPAN10; ENSG00000182612; TAA
AASGGYAIAV

SEQ ID NO: 91230 - protein, 10 aa, Homo sapiens
  Table A; Target 91230; HLA-B*56:01; TSPAN10; ENSG00000182612; TAA
AASGGYAIAV

SEQ ID NO: 91231 - protein, 10 aa, Homo sapiens
  Table A; Target 91231; HLA-C*02:02; TSPAN10; ENSG00000182612; TAA
AASGGYAIAV

SEQ ID NO: 91232 - protein, 10 aa, Homo sapiens
  Table A; Target 91232; HLA-C*03:03; TSPAN10; ENSG00000182612; TAA
AASGGYAIAV

SEQ ID NO: 91233 - protein, 10 aa, Homo sapiens
  Table A; Target 91233; HLA-C*12:03; TSPAN10; ENSG00000182612; TAA
AASGGYAIAV

SEQ ID NO: 91234 - protein, 10 aa, Homo sapiens
  Table A; Target 91234; HLA-C*16:02; TSPAN10; ENSG00000182612; TAA
AASGGYAIAV

SEQ ID NO: 91235 - protein, 10 aa, Homo sapiens
  Table A; Target 91235; HLA-C*16:04; TSPAN10; ENSG00000182612; TAA
AASGGYAIAV

SEQ ID NO: 91236 - protein, 11 aa, Homo sapiens
  Table A; Target 91236; HLA-C*16:04; TSPAN10; ENSG00000182612; TAA
AASGGYAIAVV

SEQ ID NO: 91237 - protein, 8 aa, Homo sapiens
  Table A; Target 91237; HLA-C*03:03; TSPAN10; ENSG00000182612; TAA
AASLAGCL

SEQ ID NO: 91238 - protein, 8 aa, Homo sapiens
  Table A; Target 91238; HLA-C*03:04; TSPAN10; ENSG00000182612; TAA
AASLAGCL

SEQ ID NO: 91239 - protein, 8 aa, Homo sapiens
  Table A; Target 91239; HLA-C*16:01; TSPAN10; ENSG00000182612; TAA
AASLAGCL

SEQ ID NO: 91240 - protein, 8 aa, Homo sapiens
  Table A; Target 91240; HLA-C*12:03; TSPAN10; ENSG00000182612; TAA
AAYGPGAH

SEQ ID NO: 91241 - protein, 9 aa, Homo sapiens
  Table A; Target 91241; HLA-B*46:01; TSPAN10; ENSG00000182612; TAA
AAYGPGAHG

SEQ ID NO: 91242 - protein, 9 aa, Homo sapiens
  Table A; Target 91242; HLA-C*03:03; TSPAN10; ENSG00000182612; TAA
AAYGPGAHG

SEQ ID NO: 91243 - protein, 9 aa, Homo sapiens
  Table A; Target 91243; HLA-C*03:04; TSPAN10; ENSG00000182612; TAA
AAYGPGAHG

SEQ ID NO: 91244 - protein, 10 aa, Homo sapiens
  Table A; Target 91244; HLA-C*04:01; TSPAN10; ENSG00000182612; TAA
AAYGPGAHGE

SEQ ID NO: 91245 - protein, 10 aa, Homo sapiens
  Table A; Target 91245; HLA-C*06:02; TSPAN10; ENSG00000182612; TAA
AAYGPGAHGE

SEQ ID NO: 91246 - protein, 10 aa, Homo sapiens
  Table A; Target 91246; HLA-C*16:02; TSPAN10; ENSG00000182612; TAA
AAYGPGAHGE

SEQ ID NO: 91247 - protein, 8 aa, Homo sapiens
  Table A; Target 91247; HLA-B*37:01; TSPAN10; ENSG00000182612; TAA
ADAAQRVV

SEQ ID NO: 91248 - protein, 8 aa, Homo sapiens
  Table A; Target 91248; HLA-C*06:02; TSPAN10; ENSG00000182612; TAA
ADAAQRVV

SEQ ID NO: 91249 - protein, 8 aa, Homo sapiens
  Table A; Target 91249; HLA-C*16:01; TSPAN10; ENSG00000182612; TAA
ADAAQRVV

SEQ ID NO: 91250 - protein, 8 aa, Homo sapiens
  Table A; Target 91250; HLA-C*16:02; TSPAN10; ENSG00000182612; TAA
ADAAQRVV

SEQ ID NO: 91251 - protein, 9 aa, Homo sapiens
  Table A; Target 91251; HLA-A*25:01; TSPAN10; ENSG00000182612; TAA
ADAAQRVVY

SEQ ID NO: 91252 - protein, 9 aa, Homo sapiens
  Table A; Target 91252; HLA-A*26:01; TSPAN10; ENSG00000182612; TAA
ADAAQRVVY

SEQ ID NO: 91253 - protein, 9 aa, Homo sapiens
  Table A; Target 91253; HLA-A*29:02; TSPAN10; ENSG00000182612; TAA
ADAAQRVVY

SEQ ID NO: 91254 - protein, 9 aa, Homo sapiens
  Table A; Target 91254; HLA-A*30:01; TSPAN10; ENSG00000182612; TAA
ADAAQRVVY

SEQ ID NO: 91255 - protein, 9 aa, Homo sapiens
  Table A; Target 91255; HLA-A*30:02; TSPAN10; ENSG00000182612; TAA
ADAAQRVVY

SEQ ID NO: 91256 - protein, 9 aa, Homo sapiens
  Table A; Target 91256; HLA-A*32:01; TSPAN10; ENSG00000182612; TAA
ADAAQRVVY

SEQ ID NO: 91257 - protein, 9 aa, Homo sapiens
  Table A; Target 91257; HLA-B*15:01; TSPAN10; ENSG00000182612; TAA
ADAAQRVVY

SEQ ID NO: 91258 - protein, 9 aa, Homo sapiens
  Table A; Target 91258; HLA-B*15:03; TSPAN10; ENSG00000182612; TAA
ADAAQRVVY

SEQ ID NO: 91259 - protein, 9 aa, Homo sapiens
  Table A; Target 91259; HLA-B*18:01; TSPAN10; ENSG00000182612; TAA
ADAAQRVVY

SEQ ID NO: 91260 - protein, 9 aa, Homo sapiens
  Table A; Target 91260; HLA-B*27:02; TSPAN10; ENSG00000182612; TAA
ADAAQRVVY

SEQ ID NO: 91261 - protein, 9 aa, Homo sapiens
  Table A; Target 91261; HLA-B*27:05; TSPAN10; ENSG00000182612; TAA
ADAAQRVVY

SEQ ID NO: 91262 - protein, 9 aa, Homo sapiens
  Table A; Target 91262; HLA-B*35:01; TSPAN10; ENSG00000182612; TAA
ADAAQRVVY

SEQ ID NO: 91263 - protein, 9 aa, Homo sapiens
  Table A; Target 91263; HLA-B*37:01; TSPAN10; ENSG00000182612; TAA
ADAAQRVVY

SEQ ID NO: 91264 - protein, 9 aa, Homo sapiens
  Table A; Target 91264; HLA-B*44:02; TSPAN10; ENSG00000182612; TAA
ADAAQRVVY

SEQ ID NO: 91265 - protein, 9 aa, Homo sapiens
  Table A; Target 91265; HLA-B*44:03; TSPAN10; ENSG00000182612; TAA
ADAAQRVVY

SEQ ID NO: 91266 - protein, 9 aa, Homo sapiens
  Table A; Target 91266; HLA-B*46:01; TSPAN10; ENSG00000182612; TAA
ADAAQRVVY

SEQ ID NO: 91267 - protein, 9 aa, Homo sapiens
  Table A; Target 91267; HLA-C*02:02; TSPAN10; ENSG00000182612; TAA
ADAAQRVVY

SEQ ID NO: 91268 - protein, 9 aa, Homo sapiens
  Table A; Target 91268; HLA-C*04:01; TSPAN10; ENSG00000182612; TAA
ADAAQRVVY

SEQ ID NO: 91269 - protein, 9 aa, Homo sapiens
  Table A; Target 91269; HLA-C*07:01; TSPAN10; ENSG00000182612; TAA
ADAAQRVVY

SEQ ID NO: 91270 - protein, 9 aa, Homo sapiens
  Table A; Target 91270; HLA-C*07:04; TSPAN10; ENSG00000182612; TAA
ADAAQRVVY

SEQ ID NO: 91271 - protein, 9 aa, Homo sapiens
  Table A; Target 91271; HLA-C*12:03; TSPAN10; ENSG00000182612; TAA
ADAAQRVVY

SEQ ID NO: 91272 - protein, 9 aa, Homo sapiens
  Table A; Target 91272; HLA-C*14:02; TSPAN10; ENSG00000182612; TAA
ADAAQRVVY

SEQ ID NO: 91273 - protein, 9 aa, Homo sapiens
  Table A; Target 91273; HLA-C*16:01; TSPAN10; ENSG00000182612; TAA
ADAAQRVVY

SEQ ID NO: 91274 - protein, 9 aa, Homo sapiens
  Table A; Target 91274; HLA-C*16:02; TSPAN10; ENSG00000182612; TAA
ADAAQRVVY

SEQ ID NO: 91275 - protein, 9 aa, Homo sapiens
  Table A; Target 91275; HLA-C*16:04; TSPAN10; ENSG00000182612; TAA
ADAAQRVVY

SEQ ID NO: 91276 - protein, 10 aa, Homo sapiens
  Table A; Target 91276; HLA-B*37:01; TSPAN10; ENSG00000182612; TAA
ADAAQRVVYL

SEQ ID NO: 91277 - protein, 10 aa, Homo sapiens
  Table A; Target 91277; HLA-B*40:02; TSPAN10; ENSG00000182612; TAA
ADAAQRVVYL

SEQ ID NO: 91278 - protein, 10 aa, Homo sapiens
  Table A; Target 91278; HLA-B*44:02; TSPAN10; ENSG00000182612; TAA
ADAAQRVVYL

SEQ ID NO: 91279 - protein, 10 aa, Homo sapiens
  Table A; Target 91279; HLA-C*04:01; TSPAN10; ENSG00000182612; TAA
ADAAQRVVYL

SEQ ID NO: 91280 - protein, 9 aa, Homo sapiens
  Table A; Target 91280; HLA-A*30:01; TSPAN10; ENSG00000182612; TAA
AELLLAARL

SEQ ID NO: 91281 - protein, 9 aa, Homo sapiens
  Table A; Target 91281; HLA-B*18:01; TSPAN10; ENSG00000182612; TAA
AELLLAARL

SEQ ID NO: 91282 - protein, 9 aa, Homo sapiens
  Table A; Target 91282; HLA-B*27:02; TSPAN10; ENSG00000182612; TAA
AELLLAARL

SEQ ID NO: 91283 - protein, 9 aa, Homo sapiens
  Table A; Target 91283; HLA-B*37:01; TSPAN10; ENSG00000182612; TAA
AELLLAARL

SEQ ID NO: 91284 - protein, 9 aa, Homo sapiens
  Table A; Target 91284; HLA-B*40:01; TSPAN10; ENSG00000182612; TAA
AELLLAARL

SEQ ID NO: 91285 - protein, 9 aa, Homo sapiens
  Table A; Target 91285; HLA-B*40:02; TSPAN10; ENSG00000182612; TAA
AELLLAARL

SEQ ID NO: 91286 - protein, 9 aa, Homo sapiens
  Table A; Target 91286; HLA-B*44:02; TSPAN10; ENSG00000182612; TAA
AELLLAARL

SEQ ID NO: 91287 - protein, 9 aa, Homo sapiens
  Table A; Target 91287; HLA-B*44:03; TSPAN10; ENSG00000182612; TAA
AELLLAARL

SEQ ID NO: 91288 - protein, 9 aa, Homo sapiens
  Table A; Target 91288; HLA-B*49:01; TSPAN10; ENSG00000182612; TAA
AELLLAARL

SEQ ID NO: 91289 - protein, 9 aa, Homo sapiens
  Table A; Target 91289; HLA-C*16:04; TSPAN10; ENSG00000182612; TAA
AELLLAARL

SEQ ID NO: 91290 - protein, 10 aa, Homo sapiens
  Table A; Target 91290; HLA-B*44:02; TSPAN10; ENSG00000182612; TAA
AELLLAARLL

SEQ ID NO: 91291 - protein, 10 aa, Homo sapiens
  Table A; Target 91291; HLA-B*44:03; TSPAN10; ENSG00000182612; TAA
AELLLAARLL

SEQ ID NO: 91292 - protein, 8 aa, Homo sapiens
  Table A; Target 91292; HLA-B*37:01; TSPAN10; ENSG00000182612; TAA
AGALVVAL

SEQ ID NO: 91293 - protein, 9 aa, Homo sapiens
  Table A; Target 91293; HLA-A*25:01; TSPAN10; ENSG00000182612; TAA
AGALVVALW

SEQ ID NO: 91294 - protein, 9 aa, Homo sapiens
  Table A; Target 91294; HLA-B*44:02; TSPAN10; ENSG00000182612; TAA
AGALVVALW

SEQ ID NO: 91295 - protein, 9 aa, Homo sapiens
  Table A; Target 91295; HLA-B*44:03; TSPAN10; ENSG00000182612; TAA
AGALVVALW

SEQ ID NO: 91296 - protein, 9 aa, Homo sapiens
  Table A; Target 91296; HLA-B*57:01; TSPAN10; ENSG00000182612; TAA
AGALVVALW

SEQ ID NO: 91297 - protein, 9 aa, Homo sapiens
  Table A; Target 91297; HLA-B*58:01; TSPAN10; ENSG00000182612; TAA
AGALVVALW

SEQ ID NO: 91298 - protein, 9 aa, Homo sapiens
  Table A; Target 91298; HLA-C*16:04; TSPAN10; ENSG00000182612; TAA
AGALVVALW

SEQ ID NO: 91299 - protein, 9 aa, Homo sapiens
  Table A; Target 91299; HLA-A*30:02; TSPAN10; ENSG00000182612; TAA
AGQKPLSVH

SEQ ID NO: 91300 - protein, 10 aa, Homo sapiens
  Table A; Target 91300; HLA-A*31:01; TSPAN10; ENSG00000182612; TAA
AGQKPLSVHR

SEQ ID NO: 91301 - protein, 9 aa, Homo sapiens
  Table A; Target 91301; HLA-B*27:05; TSPAN10; ENSG00000182612; TAA
AHYQDDPDL

SEQ ID NO: 91302 - protein, 9 aa, Homo sapiens
  Table A; Target 91302; HLA-B*38:01; TSPAN10; ENSG00000182612; TAA
AHYQDDPDL

SEQ ID NO: 91303 - protein, 9 aa, Homo sapiens
  Table A; Target 91303; HLA-B*39:01; TSPAN10; ENSG00000182612; TAA
AHYQDDPDL

SEQ ID NO: 91304 - protein, 11 aa, Homo sapiens
  Table A; Target 91304; HLA-B*38:01; TSPAN10; ENSG00000182612; TAA
AHYQDDPDLRF

SEQ ID NO: 91305 - protein, 9 aa, Homo sapiens
  Table A; Target 91305; HLA-A*02:03; TSPAN10; ENSG00000182612; TAA
AIGLWGLAV

SEQ ID NO: 91306 - protein, 9 aa, Homo sapiens
  Table A; Target 91306; HLA-A*02:04; TSPAN10; ENSG00000182612; TAA
AIGLWGLAV

SEQ ID NO: 91307 - protein, 9 aa, Homo sapiens
  Table A; Target 91307; HLA-A*02:03; TSPAN10; ENSG00000182612; TAA
ALAARSGAA

SEQ ID NO: 91308 - protein, 9 aa, Homo sapiens
  Table A; Target 91308; HLA-A*32:01; TSPAN10; ENSG00000182612; TAA
ALAARSGAA

SEQ ID NO: 91309 - protein, 9 aa, Homo sapiens
  Table A; Target 91309; HLA-B*08:01; TSPAN10; ENSG00000182612; TAA
ALAARSGAA

SEQ ID NO: 91310 - protein, 9 aa, Homo sapiens
  Table A; Target 91310; HLA-B*55:01; TSPAN10; ENSG00000182612; TAA
ALAARSGAA

SEQ ID NO: 91311 - protein, 10 aa, Homo sapiens
  Table A; Target 91311; HLA-A*25:01; TSPAN10; ENSG00000182612; TAA
ALAARSGAAY

SEQ ID NO: 91312 - protein, 10 aa, Homo sapiens
  Table A; Target 91312; HLA-A*26:01; TSPAN10; ENSG00000182612; TAA
ALAARSGAAY

SEQ ID NO: 91313 - protein, 10 aa, Homo sapiens
  Table A; Target 91313; HLA-A*29:02; TSPAN10; ENSG00000182612; TAA
ALAARSGAAY

SEQ ID NO: 91314 - protein, 10 aa, Homo sapiens
  Table A; Target 91314; HLA-A*30:02; TSPAN10; ENSG00000182612; TAA
ALAARSGAAY

SEQ ID NO: 91315 - protein, 10 aa, Homo sapiens
  Table A; Target 91315; HLA-A*32:01; TSPAN10; ENSG00000182612; TAA
ALAARSGAAY

SEQ ID NO: 91316 - protein, 10 aa, Homo sapiens
  Table A; Target 91316; HLA-B*15:01; TSPAN10; ENSG00000182612; TAA
ALAARSGAAY

SEQ ID NO: 91317 - protein, 10 aa, Homo sapiens
  Table A; Target 91317; HLA-B*15:03; TSPAN10; ENSG00000182612; TAA
ALAARSGAAY

SEQ ID NO: 91318 - protein, 10 aa, Homo sapiens
  Table A; Target 91318; HLA-B*46:01; TSPAN10; ENSG00000182612; TAA
ALAARSGAAY

SEQ ID NO: 91319 - protein, 10 aa, Homo sapiens
  Table A; Target 91319; HLA-C*07:04; TSPAN10; ENSG00000182612; TAA
ALAARSGAAY

SEQ ID NO: 91320 - protein, 10 aa, Homo sapiens
  Table A; Target 91320; HLA-C*14:02; TSPAN10; ENSG00000182612; TAA
ALAARSGAAY

SEQ ID NO: 91321 - protein, 9 aa, Homo sapiens
  Table A; Target 91321; HLA-A*02:01; TSPAN10; ENSG00000182612; TAA
ALAIGLWGL

SEQ ID NO: 91322 - protein, 9 aa, Homo sapiens
  Table A; Target 91322; HLA-A*02:03; TSPAN10; ENSG00000182612; TAA
ALAIGLWGL

SEQ ID NO: 91323 - protein, 9 aa, Homo sapiens
  Table A; Target 91323; HLA-A*02:04; TSPAN10; ENSG00000182612; TAA
ALAIGLWGL

SEQ ID NO: 91324 - protein, 9 aa, Homo sapiens
  Table A; Target 91324; HLA-A*02:07; TSPAN10; ENSG00000182612; TAA
ALAIGLWGL

SEQ ID NO: 91325 - protein, 11 aa, Homo sapiens
  Table A; Target 91325; HLA-A*02:04; TSPAN10; ENSG00000182612; TAA
ALAIGLWGLAV

SEQ ID NO: 91326 - protein, 9 aa, Homo sapiens
  Table A; Target 91326; HLA-A*02:01; TSPAN10; ENSG00000182612; TAA
ALCENTCLL

SEQ ID NO: 91327 - protein, 9 aa, Homo sapiens
  Table A; Target 91327; HLA-A*02:03; TSPAN10; ENSG00000182612; TAA
ALCENTCLL

SEQ ID NO: 91328 - protein, 9 aa, Homo sapiens
  Table A; Target 91328; HLA-A*02:04; TSPAN10; ENSG00000182612; TAA
ALCENTCLL

SEQ ID NO: 91329 - protein, 9 aa, Homo sapiens
  Table A; Target 91329; HLA-B*55:01; TSPAN10; ENSG00000182612; TAA
ALCENTCLL

SEQ ID NO: 91330 - protein, 9 aa, Homo sapiens
  Table A; Target 91330; HLA-A*02:01; TSPAN10; ENSG00000182612; TAA
ALGGLVVSA

SEQ ID NO: 91331 - protein, 9 aa, Homo sapiens
  Table A; Target 91331; HLA-A*02:03; TSPAN10; ENSG00000182612; TAA
ALGGLVVSA

SEQ ID NO: 91332 - protein, 9 aa, Homo sapiens
  Table A; Target 91332; HLA-A*02:04; TSPAN10; ENSG00000182612; TAA
ALGGLVVSA

SEQ ID NO: 91333 - protein, 9 aa, Homo sapiens
  Table A; Target 91333; HLA-A*02:07; TSPAN10; ENSG00000182612; TAA
ALGGLVVSA

SEQ ID NO: 91334 - protein, 9 aa, Homo sapiens
  Table A; Target 91334; HLA-A*03:02; TSPAN10; ENSG00000182612; TAA
ALGGLVVSA

SEQ ID NO: 91335 - protein, 9 aa, Homo sapiens
  Table A; Target 91335; HLA-B*13:02; TSPAN10; ENSG00000182612; TAA
ALGGLVVSA

SEQ ID NO: 91336 - protein, 9 aa, Homo sapiens
  Table A; Target 91336; HLA-B*55:01; TSPAN10; ENSG00000182612; TAA
ALGGLVVSA

SEQ ID NO: 91337 - protein, 9 aa, Homo sapiens
  Table A; Target 91337; HLA-B*56:01; TSPAN10; ENSG00000182612; TAA
ALGGLVVSA

SEQ ID NO: 91338 - protein, 9 aa, Homo sapiens
  Table A; Target 91338; HLA-C*06:02; TSPAN10; ENSG00000182612; TAA
ALGGLVVSA

SEQ ID NO: 91339 - protein, 10 aa, Homo sapiens
  Table A; Target 91339; HLA-A*02:01; TSPAN10; ENSG00000182612; TAA
ALGGLVVSAA

SEQ ID NO: 91340 - protein, 10 aa, Homo sapiens
  Table A; Target 91340; HLA-A*02:03; TSPAN10; ENSG00000182612; TAA
ALGGLVVSAA

SEQ ID NO: 91341 - protein, 10 aa, Homo sapiens
  Table A; Target 91341; HLA-B*55:01; TSPAN10; ENSG00000182612; TAA
ALGGLVVSAA

SEQ ID NO: 91342 - protein, 10 aa, Homo sapiens
  Table A; Target 91342; HLA-B*56:01; TSPAN10; ENSG00000182612; TAA
ALGGLVVSAA

SEQ ID NO: 91343 - protein, 8 aa, Homo sapiens
  Table A; Target 91343; HLA-A*03:02; TSPAN10; ENSG00000182612; TAA
ALSGTPKK

SEQ ID NO: 91344 - protein, 10 aa, Homo sapiens
  Table A; Target 91344; HLA-C*16:02; TSPAN10; ENSG00000182612; TAA
ALSGTPKKGP

SEQ ID NO: 91345 - protein, 10 aa, Homo sapiens
  Table A; Target 91345; HLA-A*02:07; TSPAN10; ENSG00000182612; TAA
ALWGPLQDSL

SEQ ID NO: 91346 - protein, 9 aa, Homo sapiens
  Table A; Target 91346; HLA-A*26:01; TSPAN10; ENSG00000182612; TAA
ANLAASGGY

SEQ ID NO: 91347 - protein, 9 aa, Homo sapiens
  Table A; Target 91347; HLA-A*29:02; TSPAN10; ENSG00000182612; TAA
ANLAASGGY

SEQ ID NO: 91348 - protein, 9 aa, Homo sapiens
  Table A; Target 91348; HLA-A*30:02; TSPAN10; ENSG00000182612; TAA
ANLAASGGY

SEQ ID NO: 91349 - protein, 9 aa, Homo sapiens
  Table A; Target 91349; HLA-B*15:01; TSPAN10; ENSG00000182612; TAA
ANLAASGGY

SEQ ID NO: 91350 - protein, 9 aa, Homo sapiens
  Table A; Target 91350; HLA-B*15:03; TSPAN10; ENSG00000182612; TAA
ANLAASGGY

SEQ ID NO: 91351 - protein, 9 aa, Homo sapiens
  Table A; Target 91351; HLA-B*39:01; TSPAN10; ENSG00000182612; TAA
ANLAASGGY

SEQ ID NO: 91352 - protein, 9 aa, Homo sapiens
  Table A; Target 91352; HLA-C*01:02; TSPAN10; ENSG00000182612; TAA
ANLAASGGY

SEQ ID NO: 91353 - protein, 9 aa, Homo sapiens
  Table A; Target 91353; HLA-C*14:02; TSPAN10; ENSG00000182612; TAA
ANLAASGGY

SEQ ID NO: 91354 - protein, 9 aa, Homo sapiens
  Table A; Target 91354; HLA-C*16:04; TSPAN10; ENSG00000182612; TAA
ANLAASGGY

SEQ ID NO: 91355 - protein, 10 aa, Homo sapiens
  Table A; Target 91355; HLA-B*07:02; TSPAN10; ENSG00000182612; TAA
APSLSPGSSC

SEQ ID NO: 91356 - protein, 10 aa, Homo sapiens
  Table A; Target 91356; HLA-B*56:01; TSPAN10; ENSG00000182612; TAA
APSLSPGSSC

SEQ ID NO: 91357 - protein, 10 aa, Homo sapiens
  Table A; Target 91357; HLA-C*07:02; TSPAN10; ENSG00000182612; TAA
APSLSPGSSC

SEQ ID NO: 91358 - protein, 11 aa, Homo sapiens
  Table A; Target 91358; HLA-B*56:01; TSPAN10; ENSG00000182612; TAA
APSLSPGSSCV

SEQ ID NO: 91359 - protein, 9 aa, Homo sapiens
  Table A; Target 91359; HLA-C*06:02; TSPAN10; ENSG00000182612; TAA
ARLLGALAA

SEQ ID NO: 91360 - protein, 10 aa, Homo sapiens
  Table A; Target 91360; HLA-B*27:02; TSPAN10; ENSG00000182612; TAA
ARLLGALAAR

SEQ ID NO: 91361 - protein, 10 aa, Homo sapiens
  Table A; Target 91361; HLA-B*27:05; TSPAN10; ENSG00000182612; TAA
ARLLGALAAR

SEQ ID NO: 91362 - protein, 9 aa, Homo sapiens
  Table A; Target 91362; HLA-B*27:05; TSPAN10; ENSG00000182612; TAA
ARSGAAYGP

SEQ ID NO: 91363 - protein, 9 aa, Homo sapiens
  Table A; Target 91363; HLA-C*06:02; TSPAN10; ENSG00000182612; TAA
ARSGAAYGP

SEQ ID NO: 91364 - protein, 9 aa, Homo sapiens
  Table A; Target 91364; HLA-A*03:02; TSPAN10; ENSG00000182612; TAA
ASGGYAIAV

SEQ ID NO: 91365 - protein, 9 aa, Homo sapiens
  Table A; Target 91365; HLA-A*11:01; TSPAN10; ENSG00000182612; TAA
ASGGYAIAV

SEQ ID NO: 91366 - protein, 9 aa, Homo sapiens
  Table A; Target 91366; HLA-B*13:02; TSPAN10; ENSG00000182612; TAA
ASGGYAIAV

SEQ ID NO: 91367 - protein, 9 aa, Homo sapiens
  Table A; Target 91367; HLA-B*40:02; TSPAN10; ENSG00000182612; TAA
ASGGYAIAV

SEQ ID NO: 91368 - protein, 9 aa, Homo sapiens
  Table A; Target 91368; HLA-B*56:01; TSPAN10; ENSG00000182612; TAA
ASGGYAIAV

SEQ ID NO: 91369 - protein, 9 aa, Homo sapiens
  Table A; Target 91369; HLA-C*01:02; TSPAN10; ENSG00000182612; TAA
ASGGYAIAV

SEQ ID NO: 91370 - protein, 9 aa, Homo sapiens
  Table A; Target 91370; HLA-C*06:02; TSPAN10; ENSG00000182612; TAA
ASGGYAIAV

SEQ ID NO: 91371 - protein, 9 aa, Homo sapiens
  Table A; Target 91371; HLA-C*12:03; TSPAN10; ENSG00000182612; TAA
ASGGYAIAV

SEQ ID NO: 91372 - protein, 9 aa, Homo sapiens
  Table A; Target 91372; HLA-C*16:02; TSPAN10; ENSG00000182612; TAA
ASGGYAIAV

SEQ ID NO: 91373 - protein, 9 aa, Homo sapiens
  Table A; Target 91373; HLA-C*16:04; TSPAN10; ENSG00000182612; TAA
ASGGYAIAV

SEQ ID NO: 91374 - protein, 9 aa, Homo sapiens
  Table A; Target 91374; HLA-B*58:01; TSPAN10; ENSG00000182612; TAA
ASVNDQCGF

SEQ ID NO: 91375 - protein, 9 aa, Homo sapiens
  Table A; Target 91375; HLA-C*16:04; TSPAN10; ENSG00000182612; TAA
ASVNDQCGF

SEQ ID NO: 91376 - protein, 11 aa, Homo sapiens
  Table A; Target 91376; HLA-A*01:01; TSPAN10; ENSG00000182612; TAA
ASYQDWQQNLY

SEQ ID NO: 91377 - protein, 8 aa, Homo sapiens
  Table A; Target 91377; HLA-B*13:02; TSPAN10; ENSG00000182612; TAA
AVAGALVV

SEQ ID NO: 91378 - protein, 8 aa, Homo sapiens
  Table A; Target 91378; HLA-B*37:01; TSPAN10; ENSG00000182612; TAA
AVAGALVV

SEQ ID NO: 91379 - protein, 8 aa, Homo sapiens
  Table A; Target 91379; HLA-B*56:01; TSPAN10; ENSG00000182612; TAA
AVAGALVV

SEQ ID NO: 91380 - protein, 8 aa, Homo sapiens
  Table A; Target 91380; HLA-C*02:02; TSPAN10; ENSG00000182612; TAA
AVAGALVV

SEQ ID NO: 91381 - protein, 8 aa, Homo sapiens
  Table A; Target 91381; HLA-C*06:02; TSPAN10; ENSG00000182612; TAA
AVAGALVV

SEQ ID NO: 91382 - protein, 8 aa, Homo sapiens
  Table A; Target 91382; HLA-C*12:03; TSPAN10; ENSG00000182612; TAA
AVAGALVV

SEQ ID NO: 91383 - protein, 9 aa, Homo sapiens
  Table A; Target 91383; HLA-B*15:01; TSPAN10; ENSG00000182612; TAA
AVAGALVVA

SEQ ID NO: 91384 - protein, 9 aa, Homo sapiens
  Table A; Target 91384; HLA-B*55:01; TSPAN10; ENSG00000182612; TAA
AVAGALVVA

SEQ ID NO: 91385 - protein, 9 aa, Homo sapiens
  Table A; Target 91385; HLA-B*56:01; TSPAN10; ENSG00000182612; TAA
AVAGALVVA

SEQ ID NO: 91386 - protein, 10 aa, Homo sapiens
  Table A; Target 91386; HLA-A*25:01; TSPAN10; ENSG00000182612; TAA
AVAGALVVAL

SEQ ID NO: 91387 - protein, 10 aa, Homo sapiens
  Table A; Target 91387; HLA-C*07:06; TSPAN10; ENSG00000182612; TAA
AVAGALVVAL

SEQ ID NO: 91388 - protein, 11 aa, Homo sapiens
  Table A; Target 91388; HLA-A*25:01; TSPAN10; ENSG00000182612; TAA
AVAGALVVALW

SEQ ID NO: 91389 - protein, 11 aa, Homo sapiens
  Table A; Target 91389; HLA-A*26:01; TSPAN10; ENSG00000182612; TAA
AVAGALVVALW

SEQ ID NO: 91390 - protein, 11 aa, Homo sapiens
  Table A; Target 91390; HLA-A*29:02; TSPAN10; ENSG00000182612; TAA
AVAGALVVALW

SEQ ID NO: 91391 - protein, 11 aa, Homo sapiens
  Table A; Target 91391; HLA-A*30:02; TSPAN10; ENSG00000182612; TAA
AVAGALVVALW

SEQ ID NO: 91392 - protein, 11 aa, Homo sapiens
  Table A; Target 91392; HLA-B*44:02; TSPAN10; ENSG00000182612; TAA
AVAGALVVALW

SEQ ID NO: 91393 - protein, 11 aa, Homo sapiens
  Table A; Target 91393; HLA-B*44:03; TSPAN10; ENSG00000182612; TAA
AVAGALVVALW

SEQ ID NO: 91394 - protein, 11 aa, Homo sapiens
  Table A; Target 91394; HLA-B*57:01; TSPAN10; ENSG00000182612; TAA
AVAGALVVALW

SEQ ID NO: 91395 - protein, 11 aa, Homo sapiens
  Table A; Target 91395; HLA-B*58:01; TSPAN10; ENSG00000182612; TAA
AVAGALVVALW

SEQ ID NO: 91396 - protein, 10 aa, Homo sapiens
  Table A; Target 91396; HLA-B*07:02; TSPAN10; ENSG00000182612; TAA
AVKGSLGSDL

SEQ ID NO: 91397 - protein, 10 aa, Homo sapiens
  Table A; Target 91397; HLA-C*01:02; TSPAN10; ENSG00000182612; TAA
AVKGSLGSDL

SEQ ID NO: 91398 - protein, 10 aa, Homo sapiens
  Table A; Target 91398; HLA-C*07:02; TSPAN10; ENSG00000182612; TAA
AVKGSLGSDL

SEQ ID NO: 91399 - protein, 9 aa, Homo sapiens
  Table A; Target 91399; HLA-C*14:02; TSPAN10; ENSG00000182612; TAA
AYGPGAHGE

SEQ ID NO: 91400 - protein, 9 aa, Homo sapiens
  Table A; Target 91400; HLA-B*54:01; TSPAN10; ENSG00000182612; TAA
CPPETKHQA

SEQ ID NO: 91401 - protein, 9 aa, Homo sapiens
  Table A; Target 91401; HLA-B*56:01; TSPAN10; ENSG00000182612; TAA
CPPETKHQA

SEQ ID NO: 91402 - protein, 10 aa, Homo sapiens
  Table A; Target 91402; HLA-B*07:02; TSPAN10; ENSG00000182612; TAA
CPPETKHQAL

SEQ ID NO: 91403 - protein, 10 aa, Homo sapiens
  Table A; Target 91403; HLA-B*08:01; TSPAN10; ENSG00000182612; TAA
CPPETKHQAL

SEQ ID NO: 91404 - protein, 10 aa, Homo sapiens
  Table A; Target 91404; HLA-B*35:03; TSPAN10; ENSG00000182612; TAA
CPPETKHQAL

SEQ ID NO: 91405 - protein, 10 aa, Homo sapiens
  Table A; Target 91405; HLA-C*01:02; TSPAN10; ENSG00000182612; TAA
CPPETKHQAL

SEQ ID NO: 91406 - protein, 10 aa, Homo sapiens
  Table A; Target 91406; HLA-C*07:02; TSPAN10; ENSG00000182612; TAA
CPPETKHQAL

SEQ ID NO: 91407 - protein, 9 aa, Homo sapiens
  Table A; Target 91407; HLA-C*16:02; TSPAN10; ENSG00000182612; TAA
CSSPGVQAC

SEQ ID NO: 91408 - protein, 8 aa, Homo sapiens
  Table A; Target 91408; HLA-A*25:01; TSPAN10; ENSG00000182612; TAA
DAAQRVVY

SEQ ID NO: 91409 - protein, 8 aa, Homo sapiens
  Table A; Target 91409; HLA-A*26:01; TSPAN10; ENSG00000182612; TAA
DAAQRVVY

SEQ ID NO: 91410 - protein, 8 aa, Homo sapiens
  Table A; Target 91410; HLA-B*08:01; TSPAN10; ENSG00000182612; TAA
DAAQRVVY

SEQ ID NO: 91411 - protein, 8 aa, Homo sapiens
  Table A; Target 91411; HLA-B*15:03; TSPAN10; ENSG00000182612; TAA
DAAQRVVY

SEQ ID NO: 91412 - protein, 8 aa, Homo sapiens
  Table A; Target 91412; HLA-B*18:01; TSPAN10; ENSG00000182612; TAA
DAAQRVVY

SEQ ID NO: 91413 - protein, 8 aa, Homo sapiens
  Table A; Target 91413; HLA-B*35:01; TSPAN10; ENSG00000182612; TAA
DAAQRVVY

SEQ ID NO: 91414 - protein, 8 aa, Homo sapiens
  Table A; Target 91414; HLA-B*51:01; TSPAN10; ENSG00000182612; TAA
DAAQRVVY

SEQ ID NO: 91415 - protein, 8 aa, Homo sapiens
  Table A; Target 91415; HLA-B*55:01; TSPAN10; ENSG00000182612; TAA
DAAQRVVY

SEQ ID NO: 91416 - protein, 8 aa, Homo sapiens
  Table A; Target 91416; HLA-C*03:03; TSPAN10; ENSG00000182612; TAA
DAAQRVVY

SEQ ID NO: 91417 - protein, 8 aa, Homo sapiens
  Table A; Target 91417; HLA-C*07:01; TSPAN10; ENSG00000182612; TAA
DAAQRVVY

SEQ ID NO: 91418 - protein, 8 aa, Homo sapiens
  Table A; Target 91418; HLA-C*12:03; TSPAN10; ENSG00000182612; TAA
DAAQRVVY

SEQ ID NO: 91419 - protein, 8 aa, Homo sapiens
  Table A; Target 91419; HLA-C*16:01; TSPAN10; ENSG00000182612; TAA
DAAQRVVY

SEQ ID NO: 91420 - protein, 8 aa, Homo sapiens
  Table A; Target 91420; HLA-C*16:02; TSPAN10; ENSG00000182612; TAA
DAAQRVVY

SEQ ID NO: 91421 - protein, 9 aa, Homo sapiens
  Table A; Target 91421; HLA-A*25:01; TSPAN10; ENSG00000182612; TAA
DAAQRVVYL

SEQ ID NO: 91422 - protein, 9 aa, Homo sapiens
  Table A; Target 91422; HLA-A*26:01; TSPAN10; ENSG00000182612; TAA
DAAQRVVYL

SEQ ID NO: 91423 - protein, 9 aa, Homo sapiens
  Table A; Target 91423; HLA-A*33:01; TSPAN10; ENSG00000182612; TAA
DAAQRVVYL

SEQ ID NO: 91424 - protein, 9 aa, Homo sapiens
  Table A; Target 91424; HLA-A*33:03; TSPAN10; ENSG00000182612; TAA
DAAQRVVYL

SEQ ID NO: 91425 - protein, 9 aa, Homo sapiens
  Table A; Target 91425; HLA-A*68:01; TSPAN10; ENSG00000182612; TAA
DAAQRVVYL

SEQ ID NO: 91426 - protein, 9 aa, Homo sapiens
  Table A; Target 91426; HLA-A*68:02; TSPAN10; ENSG00000182612; TAA
DAAQRVVYL

SEQ ID NO: 91427 - protein, 9 aa, Homo sapiens
  Table A; Target 91427; HLA-B*08:01; TSPAN10; ENSG00000182612; TAA
DAAQRVVYL

SEQ ID NO: 91428 - protein, 9 aa, Homo sapiens
  Table A; Target 91428; HLA-B*18:01; TSPAN10; ENSG00000182612; TAA
DAAQRVVYL

SEQ ID NO: 91429 - protein, 9 aa, Homo sapiens
  Table A; Target 91429; HLA-B*27:05; TSPAN10; ENSG00000182612; TAA
DAAQRVVYL

SEQ ID NO: 91430 - protein, 9 aa, Homo sapiens
  Table A; Target 91430; HLA-B*35:01; TSPAN10; ENSG00000182612; TAA
DAAQRVVYL

SEQ ID NO: 91431 - protein, 9 aa, Homo sapiens
  Table A; Target 91431; HLA-B*35:03; TSPAN10; ENSG00000182612; TAA
DAAQRVVYL

SEQ ID NO: 91432 - protein, 9 aa, Homo sapiens
  Table A; Target 91432; HLA-B*37:01; TSPAN10; ENSG00000182612; TAA
DAAQRVVYL

SEQ ID NO: 91433 - protein, 9 aa, Homo sapiens
  Table A; Target 91433; HLA-B*38:01; TSPAN10; ENSG00000182612; TAA
DAAQRVVYL

SEQ ID NO: 91434 - protein, 9 aa, Homo sapiens
  Table A; Target 91434; HLA-B*39:01; TSPAN10; ENSG00000182612; TAA
DAAQRVVYL

SEQ ID NO: 91435 - protein, 9 aa, Homo sapiens
  Table A; Target 91435; HLA-B*40:02; TSPAN10; ENSG00000182612; TAA
DAAQRVVYL

SEQ ID NO: 91436 - protein, 9 aa, Homo sapiens
  Table A; Target 91436; HLA-B*51:01; TSPAN10; ENSG00000182612; TAA
DAAQRVVYL

SEQ ID NO: 91437 - protein, 9 aa, Homo sapiens
  Table A; Target 91437; HLA-C*01:02; TSPAN10; ENSG00000182612; TAA
DAAQRVVYL

SEQ ID NO: 91438 - protein, 9 aa, Homo sapiens
  Table A; Target 91438; HLA-C*02:02; TSPAN10; ENSG00000182612; TAA
DAAQRVVYL

SEQ ID NO: 91439 - protein, 9 aa, Homo sapiens
  Table A; Target 91439; HLA-C*05:01; TSPAN10; ENSG00000182612; TAA
DAAQRVVYL

SEQ ID NO: 91440 - protein, 9 aa, Homo sapiens
  Table A; Target 91440; HLA-C*06:02; TSPAN10; ENSG00000182612; TAA
DAAQRVVYL

SEQ ID NO: 91441 - protein, 9 aa, Homo sapiens
  Table A; Target 91441; HLA-C*07:01; TSPAN10; ENSG00000182612; TAA
DAAQRVVYL

SEQ ID NO: 91442 - protein, 9 aa, Homo sapiens
  Table A; Target 91442; HLA-C*07:04; TSPAN10; ENSG00000182612; TAA
DAAQRVVYL

SEQ ID NO: 91443 - protein, 9 aa, Homo sapiens
  Table A; Target 91443; HLA-C*07:06; TSPAN10; ENSG00000182612; TAA
DAAQRVVYL

SEQ ID NO: 91444 - protein, 9 aa, Homo sapiens
  Table A; Target 91444; HLA-C*12:03; TSPAN10; ENSG00000182612; TAA
DAAQRVVYL

SEQ ID NO: 91445 - protein, 9 aa, Homo sapiens
  Table A; Target 91445; HLA-C*16:01; TSPAN10; ENSG00000182612; TAA
DAAQRVVYL

SEQ ID NO: 91446 - protein, 9 aa, Homo sapiens
  Table A; Target 91446; HLA-C*16:02; TSPAN10; ENSG00000182612; TAA
DAAQRVVYL

SEQ ID NO: 91447 - protein, 8 aa, Homo sapiens
  Table A; Target 91447; HLA-B*51:01; TSPAN10; ENSG00000182612; TAA
DADAAQRV

SEQ ID NO: 91448 - protein, 8 aa, Homo sapiens
  Table A; Target 91448; HLA-C*05:01; TSPAN10; ENSG00000182612; TAA
DADAAQRV

SEQ ID NO: 91449 - protein, 9 aa, Homo sapiens
  Table A; Target 91449; HLA-A*68:02; TSPAN10; ENSG00000182612; TAA
DADAAQRVV

SEQ ID NO: 91450 - protein, 9 aa, Homo sapiens
  Table A; Target 91450; HLA-B*07:02; TSPAN10; ENSG00000182612; TAA
DADAAQRVV

SEQ ID NO: 91451 - protein, 9 aa, Homo sapiens
  Table A; Target 91451; HLA-B*08:01; TSPAN10; ENSG00000182612; TAA
DADAAQRVV

SEQ ID NO: 91452 - protein, 9 aa, Homo sapiens
  Table A; Target 91452; HLA-B*35:01; TSPAN10; ENSG00000182612; TAA
DADAAQRVV

SEQ ID NO: 91453 - protein, 9 aa, Homo sapiens
  Table A; Target 91453; HLA-B*35:03; TSPAN10; ENSG00000182612; TAA
DADAAQRVV

SEQ ID NO: 91454 - protein, 9 aa, Homo sapiens
  Table A; Target 91454; HLA-B*38:01; TSPAN10; ENSG00000182612; TAA
DADAAQRVV

SEQ ID NO: 91455 - protein, 9 aa, Homo sapiens
  Table A; Target 91455; HLA-B*39:01; TSPAN10; ENSG00000182612; TAA
DADAAQRVV

SEQ ID NO: 91456 - protein, 9 aa, Homo sapiens
  Table A; Target 91456; HLA-B*51:01; TSPAN10; ENSG00000182612; TAA
DADAAQRVV

SEQ ID NO: 91457 - protein, 9 aa, Homo sapiens
  Table A; Target 91457; HLA-B*54:01; TSPAN10; ENSG00000182612; TAA
DADAAQRVV

SEQ ID NO: 91458 - protein, 9 aa, Homo sapiens
  Table A; Target 91458; HLA-B*55:01; TSPAN10; ENSG00000182612; TAA
DADAAQRVV

SEQ ID NO: 91459 - protein, 9 aa, Homo sapiens
  Table A; Target 91459; HLA-C*01:02; TSPAN10; ENSG00000182612; TAA
DADAAQRVV

SEQ ID NO: 91460 - protein, 9 aa, Homo sapiens
  Table A; Target 91460; HLA-C*02:02; TSPAN10; ENSG00000182612; TAA
DADAAQRVV

SEQ ID NO: 91461 - protein, 9 aa, Homo sapiens
  Table A; Target 91461; HLA-C*03:03; TSPAN10; ENSG00000182612; TAA
DADAAQRVV

SEQ ID NO: 91462 - protein, 9 aa, Homo sapiens
  Table A; Target 91462; HLA-C*03:04; TSPAN10; ENSG00000182612; TAA
DADAAQRVV

SEQ ID NO: 91463 - protein, 9 aa, Homo sapiens
  Table A; Target 91463; HLA-C*05:01; TSPAN10; ENSG00000182612; TAA
DADAAQRVV

SEQ ID NO: 91464 - protein, 9 aa, Homo sapiens
  Table A; Target 91464; HLA-C*06:02; TSPAN10; ENSG00000182612; TAA
DADAAQRVV

SEQ ID NO: 91465 - protein, 9 aa, Homo sapiens
  Table A; Target 91465; HLA-C*07:01; TSPAN10; ENSG00000182612; TAA
DADAAQRVV

SEQ ID NO: 91466 - protein, 9 aa, Homo sapiens
  Table A; Target 91466; HLA-C*07:06; TSPAN10; ENSG00000182612; TAA
DADAAQRVV

SEQ ID NO: 91467 - protein, 9 aa, Homo sapiens
  Table A; Target 91467; HLA-C*12:03; TSPAN10; ENSG00000182612; TAA
DADAAQRVV

SEQ ID NO: 91468 - protein, 9 aa, Homo sapiens
  Table A; Target 91468; HLA-C*16:01; TSPAN10; ENSG00000182612; TAA
DADAAQRVV

SEQ ID NO: 91469 - protein, 9 aa, Homo sapiens
  Table A; Target 91469; HLA-C*16:02; TSPAN10; ENSG00000182612; TAA
DADAAQRVV

SEQ ID NO: 91470 - protein, 10 aa, Homo sapiens
  Table A; Target 91470; HLA-A*01:01; TSPAN10; ENSG00000182612; TAA
DADAAQRVVY

SEQ ID NO: 91471 - protein, 10 aa, Homo sapiens
  Table A; Target 91471; HLA-A*25:01; TSPAN10; ENSG00000182612; TAA
DADAAQRVVY

SEQ ID NO: 91472 - protein, 10 aa, Homo sapiens
  Table A; Target 91472; HLA-A*26:01; TSPAN10; ENSG00000182612; TAA
DADAAQRVVY

SEQ ID NO: 91473 - protein, 10 aa, Homo sapiens
  Table A; Target 91473; HLA-A*33:01; TSPAN10; ENSG00000182612; TAA
DADAAQRVVY

SEQ ID NO: 91474 - protein, 10 aa, Homo sapiens
  Table A; Target 91474; HLA-A*33:03; TSPAN10; ENSG00000182612; TAA
DADAAQRVVY

SEQ ID NO: 91475 - protein, 10 aa, Homo sapiens
  Table A; Target 91475; HLA-A*68:01; TSPAN10; ENSG00000182612; TAA
DADAAQRVVY

SEQ ID NO: 91476 - protein, 10 aa, Homo sapiens
  Table A; Target 91476; HLA-B*15:01; TSPAN10; ENSG00000182612; TAA
DADAAQRVVY

SEQ ID NO: 91477 - protein, 10 aa, Homo sapiens
  Table A; Target 91477; HLA-B*15:03; TSPAN10; ENSG00000182612; TAA
DADAAQRVVY

SEQ ID NO: 91478 - protein, 10 aa, Homo sapiens
  Table A; Target 91478; HLA-B*18:01; TSPAN10; ENSG00000182612; TAA
DADAAQRVVY

SEQ ID NO: 91479 - protein, 10 aa, Homo sapiens
  Table A; Target 91479; HLA-B*35:01; TSPAN10; ENSG00000182612; TAA
DADAAQRVVY

SEQ ID NO: 91480 - protein, 10 aa, Homo sapiens
  Table A; Target 91480; HLA-B*35:03; TSPAN10; ENSG00000182612; TAA
DADAAQRVVY

SEQ ID NO: 91481 - protein, 10 aa, Homo sapiens
  Table A; Target 91481; HLA-B*38:01; TSPAN10; ENSG00000182612; TAA
DADAAQRVVY

SEQ ID NO: 91482 - protein, 10 aa, Homo sapiens
  Table A; Target 91482; HLA-B*39:01; TSPAN10; ENSG00000182612; TAA
DADAAQRVVY

SEQ ID NO: 91483 - protein, 10 aa, Homo sapiens
  Table A; Target 91483; HLA-B*44:02; TSPAN10; ENSG00000182612; TAA
DADAAQRVVY

SEQ ID NO: 91484 - protein, 10 aa, Homo sapiens
  Table A; Target 91484; HLA-B*44:03; TSPAN10; ENSG00000182612; TAA
DADAAQRVVY

SEQ ID NO: 91485 - protein, 10 aa, Homo sapiens
  Table A; Target 91485; HLA-B*46:01; TSPAN10; ENSG00000182612; TAA
DADAAQRVVY

SEQ ID NO: 91486 - protein, 10 aa, Homo sapiens
  Table A; Target 91486; HLA-B*51:01; TSPAN10; ENSG00000182612; TAA
DADAAQRVVY

SEQ ID NO: 91487 - protein, 10 aa, Homo sapiens
  Table A; Target 91487; HLA-B*55:01; TSPAN10; ENSG00000182612; TAA
DADAAQRVVY

SEQ ID NO: 91488 - protein, 10 aa, Homo sapiens
  Table A; Target 91488; HLA-C*02:02; TSPAN10; ENSG00000182612; TAA
DADAAQRVVY

SEQ ID NO: 91489 - protein, 10 aa, Homo sapiens
  Table A; Target 91489; HLA-C*03:03; TSPAN10; ENSG00000182612; TAA
DADAAQRVVY

SEQ ID NO: 91490 - protein, 10 aa, Homo sapiens
  Table A; Target 91490; HLA-C*03:04; TSPAN10; ENSG00000182612; TAA
DADAAQRVVY

SEQ ID NO: 91491 - protein, 10 aa, Homo sapiens
  Table A; Target 91491; HLA-C*04:01; TSPAN10; ENSG00000182612; TAA
DADAAQRVVY

SEQ ID NO: 91492 - protein, 10 aa, Homo sapiens
  Table A; Target 91492; HLA-C*05:01; TSPAN10; ENSG00000182612; TAA
DADAAQRVVY

SEQ ID NO: 91493 - protein, 10 aa, Homo sapiens
  Table A; Target 91493; HLA-C*07:01; TSPAN10; ENSG00000182612; TAA
DADAAQRVVY

SEQ ID NO: 91494 - protein, 10 aa, Homo sapiens
  Table A; Target 91494; HLA-C*07:04; TSPAN10; ENSG00000182612; TAA
DADAAQRVVY

SEQ ID NO: 91495 - protein, 10 aa, Homo sapiens
  Table A; Target 91495; HLA-C*07:06; TSPAN10; ENSG00000182612; TAA
DADAAQRVVY

SEQ ID NO: 91496 - protein, 10 aa, Homo sapiens
  Table A; Target 91496; HLA-C*12:03; TSPAN10; ENSG00000182612; TAA
DADAAQRVVY

SEQ ID NO: 91497 - protein, 10 aa, Homo sapiens
  Table A; Target 91497; HLA-C*16:01; TSPAN10; ENSG00000182612; TAA
DADAAQRVVY

SEQ ID NO: 91498 - protein, 10 aa, Homo sapiens
  Table A; Target 91498; HLA-C*16:02; TSPAN10; ENSG00000182612; TAA
DADAAQRVVY

SEQ ID NO: 91499 - protein, 10 aa, Homo sapiens
  Table A; Target 91499; HLA-C*16:04; TSPAN10; ENSG00000182612; TAA
DADAAQRVVY

SEQ ID NO: 91500 - protein, 11 aa, Homo sapiens
  Table A; Target 91500; HLA-A*33:01; TSPAN10; ENSG00000182612; TAA
DADAAQRVVYL

SEQ ID NO: 91501 - protein, 11 aa, Homo sapiens
  Table A; Target 91501; HLA-A*68:01; TSPAN10; ENSG00000182612; TAA
DADAAQRVVYL

SEQ ID NO: 91502 - protein, 11 aa, Homo sapiens
  Table A; Target 91502; HLA-B*38:01; TSPAN10; ENSG00000182612; TAA
DADAAQRVVYL

SEQ ID NO: 91503 - protein, 11 aa, Homo sapiens
  Table A; Target 91503; HLA-C*05:01; TSPAN10; ENSG00000182612; TAA
DADAAQRVVYL

SEQ ID NO: 91504 - protein, 8 aa, Homo sapiens
  Table A; Target 91504; HLA-B*08:01; TSPAN10; ENSG00000182612; TAA
DPDLRFLL

SEQ ID NO: 91505 - protein, 8 aa, Homo sapiens
  Table A; Target 91505; HLA-B*07:02; TSPAN10; ENSG00000182612; TAA
DPMLGLAL

SEQ ID NO: 91506 - protein, 8 aa, Homo sapiens
  Table A; Target 91506; HLA-B*08:01; TSPAN10; ENSG00000182612; TAA
DPMLGLAL

SEQ ID NO: 91507 - protein, 8 aa, Homo sapiens
  Table A; Target 91507; HLA-B*35:01; TSPAN10; ENSG00000182612; TAA
DPMLGLAL

SEQ ID NO: 91508 - protein, 8 aa, Homo sapiens
  Table A; Target 91508; HLA-B*35:03; TSPAN10; ENSG00000182612; TAA
DPMLGLAL

SEQ ID NO: 91509 - protein, 8 aa, Homo sapiens
  Table A; Target 91509; HLA-B*51:01; TSPAN10; ENSG00000182612; TAA
DPMLGLAL

SEQ ID NO: 91510 - protein, 9 aa, Homo sapiens
  Table A; Target 91510; HLA-B*07:02; TSPAN10; ENSG00000182612; TAA
DPREDGASV

SEQ ID NO: 91511 - protein, 9 aa, Homo sapiens
  Table A; Target 91511; HLA-B*35:03; TSPAN10; ENSG00000182612; TAA
DPREDGASV

SEQ ID NO: 91512 - protein, 9 aa, Homo sapiens
  Table A; Target 91512; HLA-B*51:01; TSPAN10; ENSG00000182612; TAA
DPREDGASV

SEQ ID NO: 91513 - protein, 9 aa, Homo sapiens
  Table A; Target 91513; HLA-C*07:02; TSPAN10; ENSG00000182612; TAA
DPREDGASV

SEQ ID NO: 91514 - protein, 8 aa, Homo sapiens
  Table A; Target 91514; HLA-C*07:01; TSPAN10; ENSG00000182612; TAA
DQCGFGVL

SEQ ID NO: 91515 - protein, 9 aa, Homo sapiens
  Table A; Target 91515; HLA-A*33:01; TSPAN10; ENSG00000182612; TAA
DQCGFGVLR

SEQ ID NO: 91516 - protein, 9 aa, Homo sapiens
  Table A; Target 91516; HLA-A*33:03; TSPAN10; ENSG00000182612; TAA
DQCGFGVLR

SEQ ID NO: 91517 - protein, 9 aa, Homo sapiens
  Table A; Target 91517; HLA-A*68:01; TSPAN10; ENSG00000182612; TAA
DQCGFGVLR

SEQ ID NO: 91518 - protein, 9 aa, Homo sapiens
  Table A; Target 91518; HLA-C*07:06; TSPAN10; ENSG00000182612; TAA
DQCGFGVLR

SEQ ID NO: 91519 - protein, 8 aa, Homo sapiens
  Table A; Target 91519; HLA-A*33:01; TSPAN10; ENSG00000182612; TAA
DSLEHTLR

SEQ ID NO: 91520 - protein, 8 aa, Homo sapiens
  Table A; Target 91520; HLA-A*33:03; TSPAN10; ENSG00000182612; TAA
DSLEHTLR

SEQ ID NO: 91521 - protein, 9 aa, Homo sapiens
  Table A; Target 91521; HLA-A*68:02; TSPAN10; ENSG00000182612; TAA
DSLEHTLRV

SEQ ID NO: 91522 - protein, 9 aa, Homo sapiens
  Table A; Target 91522; HLA-B*51:01; TSPAN10; ENSG00000182612; TAA
DSLEHTLRV

SEQ ID NO: 91523 - protein, 8 aa, Homo sapiens
  Table A; Target 91523; HLA-B*51:01; TSPAN10; ENSG00000182612; TAA
EAVAGALV

SEQ ID NO: 91524 - protein, 9 aa, Homo sapiens
  Table A; Target 91524; HLA-A*23:01; TSPAN10; ENSG00000182612; TAA
EAVAGALVV

SEQ ID NO: 91525 - protein, 9 aa, Homo sapiens
  Table A; Target 91525; HLA-A*25:01; TSPAN10; ENSG00000182612; TAA
EAVAGALVV

SEQ ID NO: 91526 - protein, 9 aa, Homo sapiens
  Table A; Target 91526; HLA-A*26:01; TSPAN10; ENSG00000182612; TAA
EAVAGALVV

SEQ ID NO: 91527 - protein, 9 aa, Homo sapiens
  Table A; Target 91527; HLA-A*33:03; TSPAN10; ENSG00000182612; TAA
EAVAGALVV

SEQ ID NO: 91528 - protein, 9 aa, Homo sapiens
  Table A; Target 91528; HLA-A*68:01; TSPAN10; ENSG00000182612; TAA
EAVAGALVV

SEQ ID NO: 91529 - protein, 9 aa, Homo sapiens
  Table A; Target 91529; HLA-A*68:02; TSPAN10; ENSG00000182612; TAA
EAVAGALVV

SEQ ID NO: 91530 - protein, 9 aa, Homo sapiens
  Table A; Target 91530; HLA-B*13:02; TSPAN10; ENSG00000182612; TAA
EAVAGALVV

SEQ ID NO: 91531 - protein, 9 aa, Homo sapiens
  Table A; Target 91531; HLA-B*35:01; TSPAN10; ENSG00000182612; TAA
EAVAGALVV

SEQ ID NO: 91532 - protein, 9 aa, Homo sapiens
  Table A; Target 91532; HLA-B*35:03; TSPAN10; ENSG00000182612; TAA
EAVAGALVV

SEQ ID NO: 91533 - protein, 9 aa, Homo sapiens
  Table A; Target 91533; HLA-B*38:01; TSPAN10; ENSG00000182612; TAA
EAVAGALVV

SEQ ID NO: 91534 - protein, 9 aa, Homo sapiens
  Table A; Target 91534; HLA-B*39:01; TSPAN10; ENSG00000182612; TAA
EAVAGALVV

SEQ ID NO: 91535 - protein, 9 aa, Homo sapiens
  Table A; Target 91535; HLA-B*40:02; TSPAN10; ENSG00000182612; TAA
EAVAGALVV

SEQ ID NO: 91536 - protein, 9 aa, Homo sapiens
  Table A; Target 91536; HLA-B*49:01; TSPAN10; ENSG00000182612; TAA
EAVAGALVV

SEQ ID NO: 91537 - protein, 9 aa, Homo sapiens
  Table A; Target 91537; HLA-B*51:01; TSPAN10; ENSG00000182612; TAA
EAVAGALVV

SEQ ID NO: 91538 - protein, 9 aa, Homo sapiens
  Table A; Target 91538; HLA-B*54:01; TSPAN10; ENSG00000182612; TAA
EAVAGALVV

SEQ ID NO: 91539 - protein, 9 aa, Homo sapiens
  Table A; Target 91539; HLA-B*56:01; TSPAN10; ENSG00000182612; TAA
EAVAGALVV

SEQ ID NO: 91540 - protein, 9 aa, Homo sapiens
  Table A; Target 91540; HLA-C*02:02; TSPAN10; ENSG00000182612; TAA
EAVAGALVV

SEQ ID NO: 91541 - protein, 9 aa, Homo sapiens
  Table A; Target 91541; HLA-C*03:03; TSPAN10; ENSG00000182612; TAA
EAVAGALVV

SEQ ID NO: 91542 - protein, 9 aa, Homo sapiens
  Table A; Target 91542; HLA-C*03:04; TSPAN10; ENSG00000182612; TAA
EAVAGALVV

SEQ ID NO: 91543 - protein, 9 aa, Homo sapiens
  Table A; Target 91543; HLA-C*05:01; TSPAN10; ENSG00000182612; TAA
EAVAGALVV

SEQ ID NO: 91544 - protein, 9 aa, Homo sapiens
  Table A; Target 91544; HLA-C*06:02; TSPAN10; ENSG00000182612; TAA
EAVAGALVV

SEQ ID NO: 91545 - protein, 9 aa, Homo sapiens
  Table A; Target 91545; HLA-C*07:01; TSPAN10; ENSG00000182612; TAA
EAVAGALVV

SEQ ID NO: 91546 - protein, 9 aa, Homo sapiens
  Table A; Target 91546; HLA-C*07:06; TSPAN10; ENSG00000182612; TAA
EAVAGALVV

SEQ ID NO: 91547 - protein, 9 aa, Homo sapiens
  Table A; Target 91547; HLA-C*12:03; TSPAN10; ENSG00000182612; TAA
EAVAGALVV

SEQ ID NO: 91548 - protein, 9 aa, Homo sapiens
  Table A; Target 91548; HLA-C*16:02; TSPAN10; ENSG00000182612; TAA
EAVAGALVV

SEQ ID NO: 91549 - protein, 9 aa, Homo sapiens
  Table A; Target 91549; HLA-C*16:04; TSPAN10; ENSG00000182612; TAA
EAVAGALVV

SEQ ID NO: 91550 - protein, 10 aa, Homo sapiens
  Table A; Target 91550; HLA-A*25:01; TSPAN10; ENSG00000182612; TAA
EAVAGALVVA

SEQ ID NO: 91551 - protein, 10 aa, Homo sapiens
  Table A; Target 91551; HLA-A*26:01; TSPAN10; ENSG00000182612; TAA
EAVAGALVVA

SEQ ID NO: 91552 - protein, 10 aa, Homo sapiens
  Table A; Target 91552; HLA-A*68:01; TSPAN10; ENSG00000182612; TAA
EAVAGALVVA

SEQ ID NO: 91553 - protein, 10 aa, Homo sapiens
  Table A; Target 91553; HLA-A*68:02; TSPAN10; ENSG00000182612; TAA
EAVAGALVVA

SEQ ID NO: 91554 - protein, 10 aa, Homo sapiens
  Table A; Target 91554; HLA-B*35:03; TSPAN10; ENSG00000182612; TAA
EAVAGALVVA

SEQ ID NO: 91555 - protein, 10 aa, Homo sapiens
  Table A; Target 91555; HLA-B*54:01; TSPAN10; ENSG00000182612; TAA
EAVAGALVVA

SEQ ID NO: 91556 - protein, 10 aa, Homo sapiens
  Table A; Target 91556; HLA-B*56:01; TSPAN10; ENSG00000182612; TAA
EAVAGALVVA

SEQ ID NO: 91557 - protein, 11 aa, Homo sapiens
  Table A; Target 91557; HLA-A*25:01; TSPAN10; ENSG00000182612; TAA
EAVAGALVVAL

SEQ ID NO: 91558 - protein, 11 aa, Homo sapiens
  Table A; Target 91558; HLA-A*26:01; TSPAN10; ENSG00000182612; TAA
EAVAGALVVAL

SEQ ID NO: 91559 - protein, 11 aa, Homo sapiens
  Table A; Target 91559; HLA-A*33:03; TSPAN10; ENSG00000182612; TAA
EAVAGALVVAL

SEQ ID NO: 91560 - protein, 11 aa, Homo sapiens
  Table A; Target 91560; HLA-A*68:01; TSPAN10; ENSG00000182612; TAA
EAVAGALVVAL

SEQ ID NO: 91561 - protein, 11 aa, Homo sapiens
  Table A; Target 91561; HLA-A*68:02; TSPAN10; ENSG00000182612; TAA
EAVAGALVVAL

SEQ ID NO: 91562 - protein, 11 aa, Homo sapiens
  Table A; Target 91562; HLA-B*35:03; TSPAN10; ENSG00000182612; TAA
EAVAGALVVAL

SEQ ID NO: 91563 - protein, 11 aa, Homo sapiens
  Table A; Target 91563; HLA-C*07:06; TSPAN10; ENSG00000182612; TAA
EAVAGALVVAL

SEQ ID NO: 91564 - protein, 9 aa, Homo sapiens
  Table A; Target 91564; HLA-A*30:01; TSPAN10; ENSG00000182612; TAA
EEGERSPLL

SEQ ID NO: 91565 - protein, 9 aa, Homo sapiens
  Table A; Target 91565; HLA-B*18:01; TSPAN10; ENSG00000182612; TAA
EEGERSPLL

SEQ ID NO: 91566 - protein, 9 aa, Homo sapiens
  Table A; Target 91566; HLA-B*37:01; TSPAN10; ENSG00000182612; TAA
EEGERSPLL

SEQ ID NO: 91567 - protein, 9 aa, Homo sapiens
  Table A; Target 91567; HLA-B*38:01; TSPAN10; ENSG00000182612; TAA
EEGERSPLL

SEQ ID NO: 91568 - protein, 9 aa, Homo sapiens
  Table A; Target 91568; HLA-B*40:01; TSPAN10; ENSG00000182612; TAA
EEGERSPLL

SEQ ID NO: 91569 - protein, 9 aa, Homo sapiens
  Table A; Target 91569; HLA-B*40:02; TSPAN10; ENSG00000182612; TAA
EEGERSPLL

SEQ ID NO: 91570 - protein, 9 aa, Homo sapiens
  Table A; Target 91570; HLA-B*44:02; TSPAN10; ENSG00000182612; TAA
EEGERSPLL

SEQ ID NO: 91571 - protein, 9 aa, Homo sapiens
  Table A; Target 91571; HLA-B*44:03; TSPAN10; ENSG00000182612; TAA
EEGERSPLL

SEQ ID NO: 91572 - protein, 9 aa, Homo sapiens
  Table A; Target 91572; HLA-B*49:01; TSPAN10; ENSG00000182612; TAA
EEGERSPLL

SEQ ID NO: 91573 - protein, 9 aa, Homo sapiens
  Table A; Target 91573; HLA-C*16:04; TSPAN10; ENSG00000182612; TAA
EEGERSPLL

SEQ ID NO: 91574 - protein, 9 aa, Homo sapiens
  Table A; Target 91574; HLA-A*33:03; TSPAN10; ENSG00000182612; TAA
EGCGPPLRR

SEQ ID NO: 91575 - protein, 8 aa, Homo sapiens
  Table A; Target 91575; HLA-B*38:01; TSPAN10; ENSG00000182612; TAA
EHTLRVAI

SEQ ID NO: 91576 - protein, 8 aa, Homo sapiens
  Table A; Target 91576; HLA-B*08:01; TSPAN10; ENSG00000182612; TAA
ELLLAARL

SEQ ID NO: 91577 - protein, 10 aa, Homo sapiens
  Table A; Target 91577; HLA-A*25:01; TSPAN10; ENSG00000182612; TAA
ETAGQKPLSV

SEQ ID NO: 91578 - protein, 10 aa, Homo sapiens
  Table A; Target 91578; HLA-A*26:01; TSPAN10; ENSG00000182612; TAA
ETAGQKPLSV

SEQ ID NO: 91579 - protein, 10 aa, Homo sapiens
  Table A; Target 91579; HLA-A*33:03; TSPAN10; ENSG00000182612; TAA
ETAGQKPLSV

SEQ ID NO: 91580 - protein, 10 aa, Homo sapiens
  Table A; Target 91580; HLA-A*68:01; TSPAN10; ENSG00000182612; TAA
ETAGQKPLSV

SEQ ID NO: 91581 - protein, 10 aa, Homo sapiens
  Table A; Target 91581; HLA-A*68:02; TSPAN10; ENSG00000182612; TAA
ETAGQKPLSV

SEQ ID NO: 91582 - protein, 8 aa, Homo sapiens
  Table A; Target 91582; HLA-A*02:01; TSPAN10; ENSG00000182612; TAA
FLLDQVQL

SEQ ID NO: 91583 - protein, 8 aa, Homo sapiens
  Table A; Target 91583; HLA-A*02:04; TSPAN10; ENSG00000182612; TAA
FLLDQVQL

SEQ ID NO: 91584 - protein, 9 aa, Homo sapiens
  Table A; Target 91584; HLA-A*02:01; TSPAN10; ENSG00000182612; TAA
FLLDQVQLG

SEQ ID NO: 91585 - protein, 9 aa, Homo sapiens
  Table A; Target 91585; HLA-A*02:04; TSPAN10; ENSG00000182612; TAA
FLLDQVQLG

SEQ ID NO: 91586 - protein, 10 aa, Homo sapiens
  Table A; Target 91586; HLA-A*02:01; TSPAN10; ENSG00000182612; TAA
FLLDQVQLGL

SEQ ID NO: 91587 - protein, 10 aa, Homo sapiens
  Table A; Target 91587; HLA-A*02:03; TSPAN10; ENSG00000182612; TAA
FLLDQVQLGL

SEQ ID NO: 91588 - protein, 10 aa, Homo sapiens
  Table A; Target 91588; HLA-A*02:04; TSPAN10; ENSG00000182612; TAA
FLLDQVQLGL

SEQ ID NO: 91589 - protein, 10 aa, Homo sapiens
  Table A; Target 91589; HLA-A*02:07; TSPAN10; ENSG00000182612; TAA
FLLDQVQLGL

SEQ ID NO: 91590 - protein, 10 aa, Homo sapiens
  Table A; Target 91590; HLA-A*03:01; TSPAN10; ENSG00000182612; TAA
FLLDQVQLGL

SEQ ID NO: 91591 - protein, 11 aa, Homo sapiens
  Table A; Target 91591; HLA-A*33:01; TSPAN10; ENSG00000182612; TAA
FLLDQVQLGLR

SEQ ID NO: 91592 - protein, 9 aa, Homo sapiens
  Table A; Target 91592; HLA-A*02:01; TSPAN10; ENSG00000182612; TAA
FLSNFPFSL

SEQ ID NO: 91593 - protein, 9 aa, Homo sapiens
  Table A; Target 91593; HLA-A*02:03; TSPAN10; ENSG00000182612; TAA
FLSNFPFSL

SEQ ID NO: 91594 - protein, 9 aa, Homo sapiens
  Table A; Target 91594; HLA-A*02:04; TSPAN10; ENSG00000182612; TAA
FLSNFPFSL

SEQ ID NO: 91595 - protein, 9 aa, Homo sapiens
  Table A; Target 91595; HLA-A*02:07; TSPAN10; ENSG00000182612; TAA
FLSNFPFSL

SEQ ID NO: 91596 - protein, 9 aa, Homo sapiens
  Table A; Target 91596; HLA-A*30:01; TSPAN10; ENSG00000182612; TAA
FLSNFPFSL

SEQ ID NO: 91597 - protein, 9 aa, Homo sapiens
  Table A; Target 91597; HLA-A*68:02; TSPAN10; ENSG00000182612; TAA
FLSNFPFSL

SEQ ID NO: 91598 - protein, 10 aa, Homo sapiens
  Table A; Target 91598; HLA-A*02:01; TSPAN10; ENSG00000182612; TAA
FLSNFPFSLL

SEQ ID NO: 91599 - protein, 10 aa, Homo sapiens
  Table A; Target 91599; HLA-A*02:03; TSPAN10; ENSG00000182612; TAA
FLSNFPFSLL

SEQ ID NO: 91600 - protein, 10 aa, Homo sapiens
  Table A; Target 91600; HLA-A*02:04; TSPAN10; ENSG00000182612; TAA
FLSNFPFSLL

SEQ ID NO: 91601 - protein, 10 aa, Homo sapiens
  Table A; Target 91601; HLA-A*02:07; TSPAN10; ENSG00000182612; TAA
FLSNFPFSLL

SEQ ID NO: 91602 - protein, 10 aa, Homo sapiens
  Table A; Target 91602; HLA-A*68:02; TSPAN10; ENSG00000182612; TAA
FLSNFPFSLL

SEQ ID NO: 91603 - protein, 10 aa, Homo sapiens
  Table A; Target 91603; HLA-A*02:03; TSPAN10; ENSG00000182612; TAA
FLVLEAVAGA

SEQ ID NO: 91604 - protein, 8 aa, Homo sapiens
  Table A; Target 91604; HLA-B*35:01; TSPAN10; ENSG00000182612; TAA
FPFSLLGL

SEQ ID NO: 91605 - protein, 8 aa, Homo sapiens
  Table A; Target 91605; HLA-B*51:01; TSPAN10; ENSG00000182612; TAA
FPFSLLGL

SEQ ID NO: 91606 - protein, 8 aa, Homo sapiens
  Table A; Target 91606; HLA-B*54:01; TSPAN10; ENSG00000182612; TAA
FPFSLLGL

SEQ ID NO: 91607 - protein, 9 aa, Homo sapiens
  Table A; Target 91607; HLA-B*35:01; TSPAN10; ENSG00000182612; TAA
FPFSLLGLL

SEQ ID NO: 91608 - protein, 9 aa, Homo sapiens
  Table A; Target 91608; HLA-B*51:01; TSPAN10; ENSG00000182612; TAA
FPFSLLGLL

SEQ ID NO: 91609 - protein, 9 aa, Homo sapiens
  Table A; Target 91609; HLA-B*54:01; TSPAN10; ENSG00000182612; TAA
FPFSLLGLL

SEQ ID NO: 91610 - protein, 10 aa, Homo sapiens
  Table A; Target 91610; HLA-B*54:01; TSPAN10; ENSG00000182612; TAA
FPFSLLGLLA

SEQ ID NO: 91611 - protein, 10 aa, Homo sapiens
  Table A; Target 91611; HLA-B*56:01; TSPAN10; ENSG00000182612; TAA
FPFSLLGLLA

SEQ ID NO: 91612 - protein, 11 aa, Homo sapiens
  Table A; Target 91612; HLA-B*54:01; TSPAN10; ENSG00000182612; TAA
FPFSLLGLLAL

SEQ ID NO: 91613 - protein, 8 aa, Homo sapiens
  Table A; Target 91613; HLA-C*12:03; TSPAN10; ENSG00000182612; TAA
FSGGILAF

SEQ ID NO: 91614 - protein, 9 aa, Homo sapiens
  Table A; Target 91614; HLA-A*68:02; TSPAN10; ENSG00000182612; TAA
FSGGILAFL

SEQ ID NO: 91615 - protein, 9 aa, Homo sapiens
  Table A; Target 91615; HLA-C*03:04; TSPAN10; ENSG00000182612; TAA
FSLLGLLAL

SEQ ID NO: 91616 - protein, 9 aa, Homo sapiens
  Table A; Target 91616; HLA-C*07:06; TSPAN10; ENSG00000182612; TAA
GAELLLAAR

SEQ ID NO: 91617 - protein, 11 aa, Homo sapiens
  Table A; Target 91617; HLA-A*26:01; TSPAN10; ENSG00000182612; TAA
GALAARSGAAY

SEQ ID NO: 91618 - protein, 11 aa, Homo sapiens
  Table A; Target 91618; HLA-A*29:02; TSPAN10; ENSG00000182612; TAA
GALAARSGAAY

SEQ ID NO: 91619 - protein, 11 aa, Homo sapiens
  Table A; Target 91619; HLA-A*30:02; TSPAN10; ENSG00000182612; TAA
GALAARSGAAY

SEQ ID NO: 91620 - protein, 11 aa, Homo sapiens
  Table A; Target 91620; HLA-A*32:01; TSPAN10; ENSG00000182612; TAA
GALAARSGAAY

SEQ ID NO: 91621 - protein, 11 aa, Homo sapiens
  Table A; Target 91621; HLA-B*15:01; TSPAN10; ENSG00000182612; TAA
GALAARSGAAY

SEQ ID NO: 91622 - protein, 11 aa, Homo sapiens
  Table A; Target 91622; HLA-B*15:03; TSPAN10; ENSG00000182612; TAA
GALAARSGAAY

SEQ ID NO: 91623 - protein, 11 aa, Homo sapiens
  Table A; Target 91623; HLA-B*35:01; TSPAN10; ENSG00000182612; TAA
GALAARSGAAY

SEQ ID NO: 91624 - protein, 11 aa, Homo sapiens
  Table A; Target 91624; HLA-B*39:01; TSPAN10; ENSG00000182612; TAA
GALAARSGAAY

SEQ ID NO: 91625 - protein, 11 aa, Homo sapiens
  Table A; Target 91625; HLA-B*46:01; TSPAN10; ENSG00000182612; TAA
GALAARSGAAY

SEQ ID NO: 91626 - protein, 11 aa, Homo sapiens
  Table A; Target 91626; HLA-B*58:01; TSPAN10; ENSG00000182612; TAA
GALAARSGAAY

SEQ ID NO: 91627 - protein, 11 aa, Homo sapiens
  Table A; Target 91627; HLA-C*01:02; TSPAN10; ENSG00000182612; TAA
GALAARSGAAY

SEQ ID NO: 91628 - protein, 11 aa, Homo sapiens
  Table A; Target 91628; HLA-C*02:02; TSPAN10; ENSG00000182612; TAA
GALAARSGAAY

SEQ ID NO: 91629 - protein, 11 aa, Homo sapiens
  Table A; Target 91629; HLA-C*07:01; TSPAN10; ENSG00000182612; TAA
GALAARSGAAY

SEQ ID NO: 91630 - protein, 11 aa, Homo sapiens
  Table A; Target 91630; HLA-C*07:02; TSPAN10; ENSG00000182612; TAA
GALAARSGAAY

SEQ ID NO: 91631 - protein, 11 aa, Homo sapiens
  Table A; Target 91631; HLA-C*07:04; TSPAN10; ENSG00000182612; TAA
GALAARSGAAY

SEQ ID NO: 91632 - protein, 11 aa, Homo sapiens
  Table A; Target 91632; HLA-C*14:02; TSPAN10; ENSG00000182612; TAA
GALAARSGAAY

SEQ ID NO: 91633 - protein, 11 aa, Homo sapiens
  Table A; Target 91633; HLA-C*16:01; TSPAN10; ENSG00000182612; TAA
GALAARSGAAY

SEQ ID NO: 91634 - protein, 11 aa, Homo sapiens
  Table A; Target 91634; HLA-C*16:04; TSPAN10; ENSG00000182612; TAA
GALAARSGAAY

SEQ ID NO: 91635 - protein, 8 aa, Homo sapiens
  Table A; Target 91635; HLA-B*57:01; TSPAN10; ENSG00000182612; TAA
GALVVALW

SEQ ID NO: 91636 - protein, 9 aa, Homo sapiens
  Table A; Target 91636; HLA-B*57:01; TSPAN10; ENSG00000182612; TAA
GCGPPLRRW

SEQ ID NO: 91637 - protein, 10 aa, Homo sapiens
  Table A; Target 91637; HLA-B*49:01; TSPAN10; ENSG00000182612; TAA
GEDRAGPQSP

SEQ ID NO: 91638 - protein, 9 aa, Homo sapiens
  Table A; Target 91638; HLA-A*23:01; TSPAN10; ENSG00000182612; TAA
GFSGGILAF

SEQ ID NO: 91639 - protein, 9 aa, Homo sapiens
  Table A; Target 91639; HLA-A*29:02; TSPAN10; ENSG00000182612; TAA
GFSGGILAF

SEQ ID NO: 91640 - protein, 9 aa, Homo sapiens
  Table A; Target 91640; HLA-B*15:01; TSPAN10; ENSG00000182612; TAA
GFSGGILAF

SEQ ID NO: 91641 - protein, 9 aa, Homo sapiens
  Table A; Target 91641; HLA-C*14:02; TSPAN10; ENSG00000182612; TAA
GFSGGILAF

SEQ ID NO: 91642 - protein, 10 aa, Homo sapiens
  Table A; Target 91642; HLA-B*40:01; TSPAN10; ENSG00000182612; TAA
GGLVVSAASL

SEQ ID NO: 91643 - protein, 9 aa, Homo sapiens
  Table A; Target 91643; HLA-C*01:02; TSPAN10; ENSG00000182612; TAA
GGPLPTDPM

SEQ ID NO: 91644 - protein, 8 aa, Homo sapiens
  Table A; Target 91644; HLA-B*13:02; TSPAN10; ENSG00000182612; TAA
GGYAIAVV

SEQ ID NO: 91645 - protein, 9 aa, Homo sapiens
  Table A; Target 91645; HLA-A*30:01; TSPAN10; ENSG00000182612; TAA
GGYAIAVVL

SEQ ID NO: 91646 - protein, 9 aa, Homo sapiens
  Table A; Target 91646; HLA-B*13:02; TSPAN10; ENSG00000182612; TAA
GGYAIAVVL

SEQ ID NO: 91647 - protein, 9 aa, Homo sapiens
  Table A; Target 91647; HLA-B*15:03; TSPAN10; ENSG00000182612; TAA
GGYAIAVVL

SEQ ID NO: 91648 - protein, 9 aa, Homo sapiens
  Table A; Target 91648; HLA-B*27:05; TSPAN10; ENSG00000182612; TAA
GGYAIAVVL

SEQ ID NO: 91649 - protein, 9 aa, Homo sapiens
  Table A; Target 91649; HLA-B*39:01; TSPAN10; ENSG00000182612; TAA
GGYAIAVVL

SEQ ID NO: 91650 - protein, 9 aa, Homo sapiens
  Table A; Target 91650; HLA-B*40:01; TSPAN10; ENSG00000182612; TAA
GGYAIAVVL

SEQ ID NO: 91651 - protein, 9 aa, Homo sapiens
  Table A; Target 91651; HLA-B*40:02; TSPAN10; ENSG00000182612; TAA
GGYAIAVVL

SEQ ID NO: 91652 - protein, 9 aa, Homo sapiens
  Table A; Target 91652; HLA-C*02:02; TSPAN10; ENSG00000182612; TAA
GGYAIAVVL

SEQ ID NO: 91653 - protein, 9 aa, Homo sapiens
  Table A; Target 91653; HLA-C*03:04; TSPAN10; ENSG00000182612; TAA
GGYAIAVVL

SEQ ID NO: 91654 - protein, 9 aa, Homo sapiens
  Table A; Target 91654; HLA-C*06:02; TSPAN10; ENSG00000182612; TAA
GGYAIAVVL

SEQ ID NO: 91655 - protein, 9 aa, Homo sapiens
  Table A; Target 91655; HLA-C*07:04; TSPAN10; ENSG00000182612; TAA
GGYAIAVVL

SEQ ID NO: 91656 - protein, 9 aa, Homo sapiens
  Table A; Target 91656; HLA-C*12:03; TSPAN10; ENSG00000182612; TAA
GGYAIAVVL

SEQ ID NO: 91657 - protein, 9 aa, Homo sapiens
  Table A; Target 91657; HLA-C*16:04; TSPAN10; ENSG00000182612; TAA
GGYAIAVVL

SEQ ID NO: 91658 - protein, 9 aa, Homo sapiens
  Table A; Target 91658; HLA-A*02:01; TSPAN10; ENSG00000182612; TAA
GLALGGLVV

SEQ ID NO: 91659 - protein, 9 aa, Homo sapiens
  Table A; Target 91659; HLA-A*02:03; TSPAN10; ENSG00000182612; TAA
GLALGGLVV

SEQ ID NO: 91660 - protein, 9 aa, Homo sapiens
  Table A; Target 91660; HLA-B*13:02; TSPAN10; ENSG00000182612; TAA
GLALGGLVV

SEQ ID NO: 91661 - protein, 9 aa, Homo sapiens
  Table A; Target 91661; HLA-B*55:01; TSPAN10; ENSG00000182612; TAA
GLALGGLVV

SEQ ID NO: 91662 - protein, 11 aa, Homo sapiens
  Table A; Target 91662; HLA-A*02:01; TSPAN10; ENSG00000182612; TAA
GLALGGLVVSA

SEQ ID NO: 91663 - protein, 11 aa, Homo sapiens
  Table A; Target 91663; HLA-A*02:03; TSPAN10; ENSG00000182612; TAA
GLALGGLVVSA

SEQ ID NO: 91664 - protein, 11 aa, Homo sapiens
  Table A; Target 91664; HLA-B*55:01; TSPAN10; ENSG00000182612; TAA
GLALGGLVVSA

SEQ ID NO: 91665 - protein, 8 aa, Homo sapiens
  Table A; Target 91665; HLA-B*08:01; TSPAN10; ENSG00000182612; TAA
GLAVKGSL

SEQ ID NO: 91666 - protein, 9 aa, Homo sapiens
  Table A; Target 91666; HLA-A*02:01; TSPAN10; ENSG00000182612; TAA
GLLALAIGL

SEQ ID NO: 91667 - protein, 9 aa, Homo sapiens
  Table A; Target 91667; HLA-A*02:04; TSPAN10; ENSG00000182612; TAA
GLLALAIGL

SEQ ID NO: 91668 - protein, 9 aa, Homo sapiens
  Table A; Target 91668; HLA-A*02:01; TSPAN10; ENSG00000182612; TAA
GLVVSAASL

SEQ ID NO: 91669 - protein, 9 aa, Homo sapiens
  Table A; Target 91669; HLA-A*02:03; TSPAN10; ENSG00000182612; TAA
GLVVSAASL

SEQ ID NO: 91670 - protein, 9 aa, Homo sapiens
  Table A; Target 91670; HLA-A*02:04; TSPAN10; ENSG00000182612; TAA
GLVVSAASL

SEQ ID NO: 91671 - protein, 9 aa, Homo sapiens
  Table A; Target 91671; HLA-A*30:01; TSPAN10; ENSG00000182612; TAA
GLVVSAASL

SEQ ID NO: 91672 - protein, 9 aa, Homo sapiens
  Table A; Target 91672; HLA-B*07:02; TSPAN10; ENSG00000182612; TAA
GLVVSAASL

SEQ ID NO: 91673 - protein, 9 aa, Homo sapiens
  Table A; Target 91673; HLA-B*13:02; TSPAN10; ENSG00000182612; TAA
GLVVSAASL

SEQ ID NO: 91674 - protein, 9 aa, Homo sapiens
  Table A; Target 91674; HLA-B*15:01; TSPAN10; ENSG00000182612; TAA
GLVVSAASL

SEQ ID NO: 91675 - protein, 9 aa, Homo sapiens
  Table A; Target 91675; HLA-B*15:03; TSPAN10; ENSG00000182612; TAA
GLVVSAASL

SEQ ID NO: 91676 - protein, 9 aa, Homo sapiens
  Table A; Target 91676; HLA-B*40:01; TSPAN10; ENSG00000182612; TAA
GLVVSAASL

SEQ ID NO: 91677 - protein, 9 aa, Homo sapiens
  Table A; Target 91677; HLA-B*40:02; TSPAN10; ENSG00000182612; TAA
GLVVSAASL

SEQ ID NO: 91678 - protein, 9 aa, Homo sapiens
  Table A; Target 91678; HLA-B*46:01; TSPAN10; ENSG00000182612; TAA
GLVVSAASL

SEQ ID NO: 91679 - protein, 9 aa, Homo sapiens
  Table A; Target 91679; HLA-B*55:01; TSPAN10; ENSG00000182612; TAA
GLVVSAASL

SEQ ID NO: 91680 - protein, 9 aa, Homo sapiens
  Table A; Target 91680; HLA-C*01:02; TSPAN10; ENSG00000182612; TAA
GLVVSAASL

SEQ ID NO: 91681 - protein, 9 aa, Homo sapiens
  Table A; Target 91681; HLA-C*03:03; TSPAN10; ENSG00000182612; TAA
GLVVSAASL

SEQ ID NO: 91682 - protein, 9 aa, Homo sapiens
  Table A; Target 91682; HLA-C*14:02; TSPAN10; ENSG00000182612; TAA
GLVVSAASL

SEQ ID NO: 91683 - protein, 9 aa, Homo sapiens
  Table A; Target 91683; HLA-B*07:02; TSPAN10; ENSG00000182612; TAA
GPLPTDPML

SEQ ID NO: 91684 - protein, 9 aa, Homo sapiens
  Table A; Target 91684; HLA-B*35:01; TSPAN10; ENSG00000182612; TAA
GPLPTDPML

SEQ ID NO: 91685 - protein, 9 aa, Homo sapiens
  Table A; Target 91685; HLA-B*35:03; TSPAN10; ENSG00000182612; TAA
GPLPTDPML

SEQ ID NO: 91686 - protein, 9 aa, Homo sapiens
  Table A; Target 91686; HLA-B*55:01; TSPAN10; ENSG00000182612; TAA
GPLPTDPML

SEQ ID NO: 91687 - protein, 9 aa, Homo sapiens
  Table A; Target 91687; HLA-B*56:01; TSPAN10; ENSG00000182612; TAA
GPLPTDPML

SEQ ID NO: 91688 - protein, 9 aa, Homo sapiens
  Table A; Target 91688; HLA-C*03:03; TSPAN10; ENSG00000182612; TAA
GPLPTDPML

SEQ ID NO: 91689 - protein, 9 aa, Homo sapiens
  Table A; Target 91689; HLA-C*07:02; TSPAN10; ENSG00000182612; TAA
GPLPTDPML

SEQ ID NO: 91690 - protein, 11 aa, Homo sapiens
  Table A; Target 91690; HLA-C*07:02; TSPAN10; ENSG00000182612; TAA
GPLPTDPMLGL

SEQ ID NO: 91691 - protein, 9 aa, Homo sapiens
  Table A; Target 91691; HLA-B*35:01; TSPAN10; ENSG00000182612; TAA
GPLQDSLEH

SEQ ID NO: 91692 - protein, 11 aa, Homo sapiens
  Table A; Target 91692; HLA-B*07:02; TSPAN10; ENSG00000182612; TAA
GPLQDSLEHTL

SEQ ID NO: 91693 - protein, 11 aa, Homo sapiens
  Table A; Target 91693; HLA-B*35:01; TSPAN10; ENSG00000182612; TAA
GPLQDSLEHTL

SEQ ID NO: 91694 - protein, 11 aa, Homo sapiens
  Table A; Target 91694; HLA-B*35:03; TSPAN10; ENSG00000182612; TAA
GPLQDSLEHTL

SEQ ID NO: 91695 - protein, 11 aa, Homo sapiens
  Table A; Target 91695; HLA-B*40:01; TSPAN10; ENSG00000182612; TAA
GPLQDSLEHTL

SEQ ID NO: 91696 - protein, 11 aa, Homo sapiens
  Table A; Target 91696; HLA-B*55:01; TSPAN10; ENSG00000182612; TAA
GPLQDSLEHTL

SEQ ID NO: 91697 - protein, 11 aa, Homo sapiens
  Table A; Target 91697; HLA-B*56:01; TSPAN10; ENSG00000182612; TAA
GPLQDSLEHTL

SEQ ID NO: 91698 - protein, 11 aa, Homo sapiens
  Table A; Target 91698; HLA-C*03:03; TSPAN10; ENSG00000182612; TAA
GPLQDSLEHTL

SEQ ID NO: 91699 - protein, 9 aa, Homo sapiens
  Table A; Target 91699; HLA-B*54:01; TSPAN10; ENSG00000182612; TAA
GPQSPSPGA

SEQ ID NO: 91700 - protein, 9 aa, Homo sapiens
  Table A; Target 91700; HLA-B*55:01; TSPAN10; ENSG00000182612; TAA
GPQSPSPGA

SEQ ID NO: 91701 - protein, 9 aa, Homo sapiens
  Table A; Target 91701; HLA-B*56:01; TSPAN10; ENSG00000182612; TAA
GPQSPSPGA

SEQ ID NO: 91702 - protein, 11 aa, Homo sapiens
  Table A; Target 91702; HLA-C*04:01; TSPAN10; ENSG00000182612; TAA
GPQSPSPGAPP

SEQ ID NO: 91703 - protein, 9 aa, Homo sapiens
  Table A; Target 91703; HLA-B*55:01; TSPAN10; ENSG00000182612; TAA
GPVPREDQA

SEQ ID NO: 91704 - protein, 9 aa, Homo sapiens
  Table A; Target 91704; HLA-B*56:01; TSPAN10; ENSG00000182612; TAA
GPVPREDQA

SEQ ID NO: 91705 - protein, 11 aa, Homo sapiens
  Table A; Target 91705; HLA-B*56:01; TSPAN10; ENSG00000182612; TAA
GPVPREDQAEA

SEQ ID NO: 91706 - protein, 8 aa, Homo sapiens
  Table A; Target 91706; HLA-B*15:01; TSPAN10; ENSG00000182612; TAA
GQKPLSVH

SEQ ID NO: 91707 - protein, 9 aa, Homo sapiens
  Table A; Target 91707; HLA-A*31:01; TSPAN10; ENSG00000182612; TAA
GQKPLSVHR

SEQ ID NO: 91708 - protein, 9 aa, Homo sapiens
  Table A; Target 91708; HLA-A*33:03; TSPAN10; ENSG00000182612; TAA
GQKPLSVHR

SEQ ID NO: 91709 - protein, 11 aa, Homo sapiens
  Table A; Target 91709; HLA-A*31:01; TSPAN10; ENSG00000182612; TAA
GQKPLSVHRPP

SEQ ID NO: 91710 - protein, 8 aa, Homo sapiens
  Table A; Target 91710; HLA-C*05:01; TSPAN10; ENSG00000182612; TAA
GSDLGGPL

SEQ ID NO: 91711 - protein, 11 aa, Homo sapiens
  Table A; Target 91711; HLA-C*06:02; TSPAN10; ENSG00000182612; TAA
GTPKKGPAPSL

SEQ ID NO: 91712 - protein, 8 aa, Homo sapiens
  Table A; Target 91712; HLA-A*23:01; TSPAN10; ENSG00000182612; TAA
GYAIAVVL

SEQ ID NO: 91713 - protein, 8 aa, Homo sapiens
  Table A; Target 91713; HLA-C*14:02; TSPAN10; ENSG00000182612; TAA
GYAIAVVL

SEQ ID NO: 91714 - protein, 9 aa, Homo sapiens
  Table A; Target 91714; HLA-A*23:01; TSPAN10; ENSG00000182612; TAA
GYAIAVVLL

SEQ ID NO: 91715 - protein, 9 aa, Homo sapiens
  Table A; Target 91715; HLA-A*24:02; TSPAN10; ENSG00000182612; TAA
GYAIAVVLL

SEQ ID NO: 91716 - protein, 8 aa, Homo sapiens
  Table A; Target 91716; HLA-C*07:04; TSPAN10; ENSG00000182612; TAA
HQALSGTP

SEQ ID NO: 91717 - protein, 9 aa, Homo sapiens
  Table A; Target 91717; HLA-A*03:01; TSPAN10; ENSG00000182612; TAA
HQALSGTPK

SEQ ID NO: 91718 - protein, 9 aa, Homo sapiens
  Table A; Target 91718; HLA-A*03:02; TSPAN10; ENSG00000182612; TAA
HQALSGTPK

SEQ ID NO: 91719 - protein, 9 aa, Homo sapiens
  Table A; Target 91719; HLA-A*11:01; TSPAN10; ENSG00000182612; TAA
HQALSGTPK

SEQ ID NO: 91720 - protein, 9 aa, Homo sapiens
  Table A; Target 91720; HLA-A*68:01; TSPAN10; ENSG00000182612; TAA
HQALSGTPK

SEQ ID NO: 91721 - protein, 9 aa, Homo sapiens
  Table A; Target 91721; HLA-B*15:03; TSPAN10; ENSG00000182612; TAA
HQALSGTPK

SEQ ID NO: 91722 - protein, 9 aa, Homo sapiens
  Table A; Target 91722; HLA-B*27:05; TSPAN10; ENSG00000182612; TAA
HQALSGTPK

SEQ ID NO: 91723 - protein, 9 aa, Homo sapiens
  Table A; Target 91723; HLA-B*39:01; TSPAN10; ENSG00000182612; TAA
HQALSGTPK

SEQ ID NO: 91724 - protein, 9 aa, Homo sapiens
  Table A; Target 91724; HLA-C*04:01; TSPAN10; ENSG00000182612; TAA
HQALSGTPK

SEQ ID NO: 91725 - protein, 9 aa, Homo sapiens
  Table A; Target 91725; HLA-C*06:02; TSPAN10; ENSG00000182612; TAA
HQALSGTPK

SEQ ID NO: 91726 - protein, 9 aa, Homo sapiens
  Table A; Target 91726; HLA-C*07:01; TSPAN10; ENSG00000182612; TAA
HQALSGTPK

SEQ ID NO: 91727 - protein, 9 aa, Homo sapiens
  Table A; Target 91727; HLA-C*07:04; TSPAN10; ENSG00000182612; TAA
HQALSGTPK

SEQ ID NO: 91728 - protein, 9 aa, Homo sapiens
  Table A; Target 91728; HLA-C*07:06; TSPAN10; ENSG00000182612; TAA
HQALSGTPK

SEQ ID NO: 91729 - protein, 9 aa, Homo sapiens
  Table A; Target 91729; HLA-B*27:05; TSPAN10; ENSG00000182612; TAA
HRPPTSGCL

SEQ ID NO: 91730 - protein, 9 aa, Homo sapiens
  Table A; Target 91730; HLA-C*06:02; TSPAN10; ENSG00000182612; TAA
HRPPTSGCL

SEQ ID NO: 91731 - protein, 9 aa, Homo sapiens
  Table A; Target 91731; HLA-C*07:02; TSPAN10; ENSG00000182612; TAA
HRPPTSGCL

SEQ ID NO: 91732 - protein, 10 aa, Homo sapiens
  Table A; Target 91732; HLA-A*29:02; TSPAN10; ENSG00000182612; TAA
HTLRVAIAHY

SEQ ID NO: 91733 - protein, 10 aa, Homo sapiens
  Table A; Target 91733; HLA-A*30:02; TSPAN10; ENSG00000182612; TAA
HTLRVAIAHY

SEQ ID NO: 91734 - protein, 10 aa, Homo sapiens
  Table A; Target 91734; HLA-B*57:01; TSPAN10; ENSG00000182612; TAA
HTLRVAIAHY

SEQ ID NO: 91735 - protein, 8 aa, Homo sapiens
  Table A; Target 91735; HLA-C*14:02; TSPAN10; ENSG00000182612; TAA
HYQDDPDL

SEQ ID NO: 91736 - protein, 9 aa, Homo sapiens
  Table A; Target 91736; HLA-A*31:01; TSPAN10; ENSG00000182612; TAA
HYQDDPDLR

SEQ ID NO: 91737 - protein, 9 aa, Homo sapiens
  Table A; Target 91737; HLA-A*33:01; TSPAN10; ENSG00000182612; TAA
HYQDDPDLR

SEQ ID NO: 91738 - protein, 9 aa, Homo sapiens
  Table A; Target 91738; HLA-A*33:03; TSPAN10; ENSG00000182612; TAA
HYQDDPDLR

SEQ ID NO: 91739 - protein, 10 aa, Homo sapiens
  Table A; Target 91739; HLA-A*23:01; TSPAN10; ENSG00000182612; TAA
HYQDDPDLRF

SEQ ID NO: 91740 - protein, 10 aa, Homo sapiens
  Table A; Target 91740; HLA-A*24:02; TSPAN10; ENSG00000182612; TAA
HYQDDPDLRF

SEQ ID NO: 91741 - protein, 10 aa, Homo sapiens
  Table A; Target 91741; HLA-A*29:02; TSPAN10; ENSG00000182612; TAA
HYQDDPDLRF

SEQ ID NO: 91742 - protein, 10 aa, Homo sapiens
  Table A; Target 91742; HLA-B*35:01; TSPAN10; ENSG00000182612; TAA
HYQDDPDLRF

SEQ ID NO: 91743 - protein, 11 aa, Homo sapiens
  Table A; Target 91743; HLA-A*24:02; TSPAN10; ENSG00000182612; TAA
HYQDDPDLRFL

SEQ ID NO: 91744 - protein, 9 aa, Homo sapiens
  Table A; Target 91744; HLA-B*54:01; TSPAN10; ENSG00000182612; TAA
IAVVLLQGA

SEQ ID NO: 91745 - protein, 11 aa, Homo sapiens
  Table A; Target 91745; HLA-C*03:03; TSPAN10; ENSG00000182612; TAA
IAVVLLQGAEL

SEQ ID NO: 91746 - protein, 9 aa, Homo sapiens
  Table A; Target 91746; HLA-A*02:01; TSPAN10; ENSG00000182612; TAA
ILAFLVLEA

SEQ ID NO: 91747 - protein, 9 aa, Homo sapiens
  Table A; Target 91747; HLA-A*02:03; TSPAN10; ENSG00000182612; TAA
ILAFLVLEA

SEQ ID NO: 91748 - protein, 9 aa, Homo sapiens
  Table A; Target 91748; HLA-B*13:02; TSPAN10; ENSG00000182612; TAA
ILAFLVLEA

SEQ ID NO: 91749 - protein, 10 aa, Homo sapiens
  Table A; Target 91749; HLA-A*02:01; TSPAN10; ENSG00000182612; TAA
ILAFLVLEAV

SEQ ID NO: 91750 - protein, 10 aa, Homo sapiens
  Table A; Target 91750; HLA-A*02:03; TSPAN10; ENSG00000182612; TAA
ILAFLVLEAV

SEQ ID NO: 91751 - protein, 10 aa, Homo sapiens
  Table A; Target 91751; HLA-A*02:04; TSPAN10; ENSG00000182612; TAA
ILAFLVLEAV

SEQ ID NO: 91752 - protein, 9 aa, Homo sapiens
  Table A; Target 91752; HLA-C*01:02; TSPAN10; ENSG00000182612; TAA
KGPAPSLSP

SEQ ID NO: 91753 - protein, 10 aa, Homo sapiens
  Table A; Target 91753; HLA-A*03:01; TSPAN10; ENSG00000182612; TAA
KHQALSGTPK

SEQ ID NO: 91754 - protein, 10 aa, Homo sapiens
  Table A; Target 91754; HLA-A*03:02; TSPAN10; ENSG00000182612; TAA
KHQALSGTPK

SEQ ID NO: 91755 - protein, 10 aa, Homo sapiens
  Table A; Target 91755; HLA-B*27:05; TSPAN10; ENSG00000182612; TAA
KHQALSGTPK

SEQ ID NO: 91756 - protein, 10 aa, Homo sapiens
  Table A; Target 91756; HLA-C*06:02; TSPAN10; ENSG00000182612; TAA
KHQALSGTPK

SEQ ID NO: 91757 - protein, 10 aa, Homo sapiens
  Table A; Target 91757; HLA-C*07:01; TSPAN10; ENSG00000182612; TAA
KHQALSGTPK

SEQ ID NO: 91758 - protein, 8 aa, Homo sapiens
  Table A; Target 91758; HLA-B*15:03; TSPAN10; ENSG00000182612; TAA
KKGPAPSL

SEQ ID NO: 91759 - protein, 9 aa, Homo sapiens
  Table A; Target 91759; HLA-A*23:01; TSPAN10; ENSG00000182612; TAA
KYLIFLSNF

SEQ ID NO: 91760 - protein, 9 aa, Homo sapiens
  Table A; Target 91760; HLA-A*24:02; TSPAN10; ENSG00000182612; TAA
KYLIFLSNF

SEQ ID NO: 91761 - protein, 8 aa, Homo sapiens
  Table A; Target 91761; HLA-B*54:01; TSPAN10; ENSG00000182612; TAA
LAARLLGA

SEQ ID NO: 91762 - protein, 9 aa, Homo sapiens
  Table A; Target 91762; HLA-B*07:02; TSPAN10; ENSG00000182612; TAA
LAARLLGAL

SEQ ID NO: 91763 - protein, 9 aa, Homo sapiens
  Table A; Target 91763; HLA-B*40:02; TSPAN10; ENSG00000182612; TAA
LAARLLGAL

SEQ ID NO: 91764 - protein, 9 aa, Homo sapiens
  Table A; Target 91764; HLA-B*46:01; TSPAN10; ENSG00000182612; TAA
LAARLLGAL

SEQ ID NO: 91765 - protein, 9 aa, Homo sapiens
  Table A; Target 91765; HLA-B*54:01; TSPAN10; ENSG00000182612; TAA
LAARLLGAL

SEQ ID NO: 91766 - protein, 9 aa, Homo sapiens
  Table A; Target 91766; HLA-C*02:02; TSPAN10; ENSG00000182612; TAA
LAARLLGAL

SEQ ID NO: 91767 - protein, 9 aa, Homo sapiens
  Table A; Target 91767; HLA-C*03:03; TSPAN10; ENSG00000182612; TAA
LAARLLGAL

SEQ ID NO: 91768 - protein, 9 aa, Homo sapiens
  Table A; Target 91768; HLA-C*03:04; TSPAN10; ENSG00000182612; TAA
LAARLLGAL

SEQ ID NO: 91769 - protein, 9 aa, Homo sapiens
  Table A; Target 91769; HLA-C*06:02; TSPAN10; ENSG00000182612; TAA
LAARLLGAL

SEQ ID NO: 91770 - protein, 9 aa, Homo sapiens
  Table A; Target 91770; HLA-C*07:01; TSPAN10; ENSG00000182612; TAA
LAARLLGAL

SEQ ID NO: 91771 - protein, 9 aa, Homo sapiens
  Table A; Target 91771; HLA-C*07:02; TSPAN10; ENSG00000182612; TAA
LAARLLGAL

SEQ ID NO: 91772 - protein, 9 aa, Homo sapiens
  Table A; Target 91772; HLA-C*12:03; TSPAN10; ENSG00000182612; TAA
LAARLLGAL

SEQ ID NO: 91773 - protein, 9 aa, Homo sapiens
  Table A; Target 91773; HLA-C*16:01; TSPAN10; ENSG00000182612; TAA
LAARLLGAL

SEQ ID NO: 91774 - protein, 9 aa, Homo sapiens
  Table A; Target 91774; HLA-C*16:02; TSPAN10; ENSG00000182612; TAA
LAARLLGAL

SEQ ID NO: 91775 - protein, 10 aa, Homo sapiens
  Table A; Target 91775; HLA-B*54:01; TSPAN10; ENSG00000182612; TAA
LAARLLGALA

SEQ ID NO: 91776 - protein, 11 aa, Homo sapiens
  Table A; Target 91776; HLA-B*54:01; TSPAN10; ENSG00000182612; TAA
LAARLLGALAA

SEQ ID NO: 91777 - protein, 9 aa, Homo sapiens
  Table A; Target 91777; HLA-A*01:01; TSPAN10; ENSG00000182612; TAA
LAARSGAAY

SEQ ID NO: 91778 - protein, 9 aa, Homo sapiens
  Table A; Target 91778; HLA-A*23:01; TSPAN10; ENSG00000182612; TAA
LAARSGAAY

SEQ ID NO: 91779 - protein, 9 aa, Homo sapiens
  Table A; Target 91779; HLA-A*25:01; TSPAN10; ENSG00000182612; TAA
LAARSGAAY

SEQ ID NO: 91780 - protein, 9 aa, Homo sapiens
  Table A; Target 91780; HLA-A*26:01; TSPAN10; ENSG00000182612; TAA
LAARSGAAY

SEQ ID NO: 91781 - protein, 9 aa, Homo sapiens
  Table A; Target 91781; HLA-A*29:02; TSPAN10; ENSG00000182612; TAA
LAARSGAAY

SEQ ID NO: 91782 - protein, 9 aa, Homo sapiens
  Table A; Target 91782; HLA-A*30:02; TSPAN10; ENSG00000182612; TAA
LAARSGAAY

SEQ ID NO: 91783 - protein, 9 aa, Homo sapiens
  Table A; Target 91783; HLA-A*32:01; TSPAN10; ENSG00000182612; TAA
LAARSGAAY

SEQ ID NO: 91784 - protein, 9 aa, Homo sapiens
  Table A; Target 91784; HLA-B*15:01; TSPAN10; ENSG00000182612; TAA
LAARSGAAY

SEQ ID NO: 91785 - protein, 9 aa, Homo sapiens
  Table A; Target 91785; HLA-B*15:03; TSPAN10; ENSG00000182612; TAA
LAARSGAAY

SEQ ID NO: 91786 - protein, 9 aa, Homo sapiens
  Table A; Target 91786; HLA-B*27:05; TSPAN10; ENSG00000182612; TAA
LAARSGAAY

SEQ ID NO: 91787 - protein, 9 aa, Homo sapiens
  Table A; Target 91787; HLA-B*35:01; TSPAN10; ENSG00000182612; TAA
LAARSGAAY

SEQ ID NO: 91788 - protein, 9 aa, Homo sapiens
  Table A; Target 91788; HLA-B*39:01; TSPAN10; ENSG00000182612; TAA
LAARSGAAY

SEQ ID NO: 91789 - protein, 9 aa, Homo sapiens
  Table A; Target 91789; HLA-B*46:01; TSPAN10; ENSG00000182612; TAA
LAARSGAAY

SEQ ID NO: 91790 - protein, 9 aa, Homo sapiens
  Table A; Target 91790; HLA-B*55:01; TSPAN10; ENSG00000182612; TAA
LAARSGAAY

SEQ ID NO: 91791 - protein, 9 aa, Homo sapiens
  Table A; Target 91791; HLA-B*57:01; TSPAN10; ENSG00000182612; TAA
LAARSGAAY

SEQ ID NO: 91792 - protein, 9 aa, Homo sapiens
  Table A; Target 91792; HLA-B*58:01; TSPAN10; ENSG00000182612; TAA
LAARSGAAY

SEQ ID NO: 91793 - protein, 9 aa, Homo sapiens
  Table A; Target 91793; HLA-C*01:02; TSPAN10; ENSG00000182612; TAA
LAARSGAAY

SEQ ID NO: 91794 - protein, 9 aa, Homo sapiens
  Table A; Target 91794; HLA-C*02:02; TSPAN10; ENSG00000182612; TAA
LAARSGAAY

SEQ ID NO: 91795 - protein, 9 aa, Homo sapiens
  Table A; Target 91795; HLA-C*03:03; TSPAN10; ENSG00000182612; TAA
LAARSGAAY

SEQ ID NO: 91796 - protein, 9 aa, Homo sapiens
  Table A; Target 91796; HLA-C*03:04; TSPAN10; ENSG00000182612; TAA
LAARSGAAY

SEQ ID NO: 91797 - protein, 9 aa, Homo sapiens
  Table A; Target 91797; HLA-C*04:01; TSPAN10; ENSG00000182612; TAA
LAARSGAAY

SEQ ID NO: 91798 - protein, 9 aa, Homo sapiens
  Table A; Target 91798; HLA-C*05:01; TSPAN10; ENSG00000182612; TAA
LAARSGAAY

SEQ ID NO: 91799 - protein, 9 aa, Homo sapiens
  Table A; Target 91799; HLA-C*07:01; TSPAN10; ENSG00000182612; TAA
LAARSGAAY

SEQ ID NO: 91800 - protein, 9 aa, Homo sapiens
  Table A; Target 91800; HLA-C*07:04; TSPAN10; ENSG00000182612; TAA
LAARSGAAY

SEQ ID NO: 91801 - protein, 9 aa, Homo sapiens
  Table A; Target 91801; HLA-C*07:06; TSPAN10; ENSG00000182612; TAA
LAARSGAAY

SEQ ID NO: 91802 - protein, 9 aa, Homo sapiens
  Table A; Target 91802; HLA-C*12:03; TSPAN10; ENSG00000182612; TAA
LAARSGAAY

SEQ ID NO: 91803 - protein, 9 aa, Homo sapiens
  Table A; Target 91803; HLA-C*14:02; TSPAN10; ENSG00000182612; TAA
LAARSGAAY

SEQ ID NO: 91804 - protein, 9 aa, Homo sapiens
  Table A; Target 91804; HLA-C*16:01; TSPAN10; ENSG00000182612; TAA
LAARSGAAY

SEQ ID NO: 91805 - protein, 9 aa, Homo sapiens
  Table A; Target 91805; HLA-C*16:02; TSPAN10; ENSG00000182612; TAA
LAARSGAAY

SEQ ID NO: 91806 - protein, 9 aa, Homo sapiens
  Table A; Target 91806; HLA-C*16:04; TSPAN10; ENSG00000182612; TAA
LAARSGAAY

SEQ ID NO: 91807 - protein, 8 aa, Homo sapiens
  Table A; Target 91807; HLA-B*39:01; TSPAN10; ENSG00000182612; TAA
LAASGGYA

SEQ ID NO: 91808 - protein, 9 aa, Homo sapiens
  Table A; Target 91808; HLA-A*23:01; TSPAN10; ENSG00000182612; TAA
LAASGGYAI

SEQ ID NO: 91809 - protein, 9 aa, Homo sapiens
  Table A; Target 91809; HLA-A*24:02; TSPAN10; ENSG00000182612; TAA
LAASGGYAI

SEQ ID NO: 91810 - protein, 9 aa, Homo sapiens
  Table A; Target 91810; HLA-A*30:01; TSPAN10; ENSG00000182612; TAA
LAASGGYAI

SEQ ID NO: 91811 - protein, 9 aa, Homo sapiens
  Table A; Target 91811; HLA-A*32:01; TSPAN10; ENSG00000182612; TAA
LAASGGYAI

SEQ ID NO: 91812 - protein, 9 aa, Homo sapiens
  Table A; Target 91812; HLA-A*68:02; TSPAN10; ENSG00000182612; TAA
LAASGGYAI

SEQ ID NO: 91813 - protein, 9 aa, Homo sapiens
  Table A; Target 91813; HLA-B*07:02; TSPAN10; ENSG00000182612; TAA
LAASGGYAI

SEQ ID NO: 91814 - protein, 9 aa, Homo sapiens
  Table A; Target 91814; HLA-B*08:01; TSPAN10; ENSG00000182612; TAA
LAASGGYAI

SEQ ID NO: 91815 - protein, 9 aa, Homo sapiens
  Table A; Target 91815; HLA-B*13:02; TSPAN10; ENSG00000182612; TAA
LAASGGYAI

SEQ ID NO: 91816 - protein, 9 aa, Homo sapiens
  Table A; Target 91816; HLA-B*15:03; TSPAN10; ENSG00000182612; TAA
LAASGGYAI

SEQ ID NO: 91817 - protein, 9 aa, Homo sapiens
  Table A; Target 91817; HLA-B*27:05; TSPAN10; ENSG00000182612; TAA
LAASGGYAI

SEQ ID NO: 91818 - protein, 9 aa, Homo sapiens
  Table A; Target 91818; HLA-B*35:01; TSPAN10; ENSG00000182612; TAA
LAASGGYAI

SEQ ID NO: 91819 - protein, 9 aa, Homo sapiens
  Table A; Target 91819; HLA-B*35:03; TSPAN10; ENSG00000182612; TAA
LAASGGYAI

SEQ ID NO: 91820 - protein, 9 aa, Homo sapiens
  Table A; Target 91820; HLA-B*38:01; TSPAN10; ENSG00000182612; TAA
LAASGGYAI

SEQ ID NO: 91821 - protein, 9 aa, Homo sapiens
  Table A; Target 91821; HLA-B*39:01; TSPAN10; ENSG00000182612; TAA
LAASGGYAI

SEQ ID NO: 91822 - protein, 9 aa, Homo sapiens
  Table A; Target 91822; HLA-B*40:01; TSPAN10; ENSG00000182612; TAA
LAASGGYAI

SEQ ID NO: 91823 - protein, 9 aa, Homo sapiens
  Table A; Target 91823; HLA-B*40:02; TSPAN10; ENSG00000182612; TAA
LAASGGYAI

SEQ ID NO: 91824 - protein, 9 aa, Homo sapiens
  Table A; Target 91824; HLA-B*46:01; TSPAN10; ENSG00000182612; TAA
LAASGGYAI

SEQ ID NO: 91825 - protein, 9 aa, Homo sapiens
  Table A; Target 91825; HLA-B*51:01; TSPAN10; ENSG00000182612; TAA
LAASGGYAI

SEQ ID NO: 91826 - protein, 9 aa, Homo sapiens
  Table A; Target 91826; HLA-B*54:01; TSPAN10; ENSG00000182612; TAA
LAASGGYAI

SEQ ID NO: 91827 - protein, 9 aa, Homo sapiens
  Table A; Target 91827; HLA-B*55:01; TSPAN10; ENSG00000182612; TAA
LAASGGYAI

SEQ ID NO: 91828 - protein, 9 aa, Homo sapiens
  Table A; Target 91828; HLA-B*56:01; TSPAN10; ENSG00000182612; TAA
LAASGGYAI

SEQ ID NO: 91829 - protein, 9 aa, Homo sapiens
  Table A; Target 91829; HLA-B*58:01; TSPAN10; ENSG00000182612; TAA
LAASGGYAI

SEQ ID NO: 91830 - protein, 9 aa, Homo sapiens
  Table A; Target 91830; HLA-C*01:02; TSPAN10; ENSG00000182612; TAA
LAASGGYAI

SEQ ID NO: 91831 - protein, 9 aa, Homo sapiens
  Table A; Target 91831; HLA-C*02:02; TSPAN10; ENSG00000182612; TAA
LAASGGYAI

SEQ ID NO: 91832 - protein, 9 aa, Homo sapiens
  Table A; Target 91832; HLA-C*03:03; TSPAN10; ENSG00000182612; TAA
LAASGGYAI

SEQ ID NO: 91833 - protein, 9 aa, Homo sapiens
  Table A; Target 91833; HLA-C*03:04; TSPAN10; ENSG00000182612; TAA
LAASGGYAI

SEQ ID NO: 91834 - protein, 9 aa, Homo sapiens
  Table A; Target 91834; HLA-C*05:01; TSPAN10; ENSG00000182612; TAA
LAASGGYAI

SEQ ID NO: 91835 - protein, 9 aa, Homo sapiens
  Table A; Target 91835; HLA-C*06:02; TSPAN10; ENSG00000182612; TAA
LAASGGYAI

SEQ ID NO: 91836 - protein, 9 aa, Homo sapiens
  Table A; Target 91836; HLA-C*07:01; TSPAN10; ENSG00000182612; TAA
LAASGGYAI

SEQ ID NO: 91837 - protein, 9 aa, Homo sapiens
  Table A; Target 91837; HLA-C*07:02; TSPAN10; ENSG00000182612; TAA
LAASGGYAI

SEQ ID NO: 91838 - protein, 9 aa, Homo sapiens
  Table A; Target 91838; HLA-C*07:04; TSPAN10; ENSG00000182612; TAA
LAASGGYAI

SEQ ID NO: 91839 - protein, 9 aa, Homo sapiens
  Table A; Target 91839; HLA-C*12:03; TSPAN10; ENSG00000182612; TAA
LAASGGYAI

SEQ ID NO: 91840 - protein, 9 aa, Homo sapiens
  Table A; Target 91840; HLA-C*14:02; TSPAN10; ENSG00000182612; TAA
LAASGGYAI

SEQ ID NO: 91841 - protein, 9 aa, Homo sapiens
  Table A; Target 91841; HLA-C*16:01; TSPAN10; ENSG00000182612; TAA
LAASGGYAI

SEQ ID NO: 91842 - protein, 9 aa, Homo sapiens
  Table A; Target 91842; HLA-C*16:02; TSPAN10; ENSG00000182612; TAA
LAASGGYAI

SEQ ID NO: 91843 - protein, 9 aa, Homo sapiens
  Table A; Target 91843; HLA-C*16:04; TSPAN10; ENSG00000182612; TAA
LAASGGYAI

SEQ ID NO: 91844 - protein, 8 aa, Homo sapiens
  Table A; Target 91844; HLA-B*54:01; TSPAN10; ENSG00000182612; TAA
LAFLVLEA

SEQ ID NO: 91845 - protein, 8 aa, Homo sapiens
  Table A; Target 91845; HLA-B*56:01; TSPAN10; ENSG00000182612; TAA
LAFLVLEA

SEQ ID NO: 91846 - protein, 9 aa, Homo sapiens
  Table A; Target 91846; HLA-A*68:02; TSPAN10; ENSG00000182612; TAA
LAFLVLEAV

SEQ ID NO: 91847 - protein, 9 aa, Homo sapiens
  Table A; Target 91847; HLA-B*18:01; TSPAN10; ENSG00000182612; TAA
LAFLVLEAV

SEQ ID NO: 91848 - protein, 9 aa, Homo sapiens
  Table A; Target 91848; HLA-B*40:02; TSPAN10; ENSG00000182612; TAA
LAFLVLEAV

SEQ ID NO: 91849 - protein, 9 aa, Homo sapiens
  Table A; Target 91849; HLA-B*46:01; TSPAN10; ENSG00000182612; TAA
LAFLVLEAV

SEQ ID NO: 91850 - protein, 9 aa, Homo sapiens
  Table A; Target 91850; HLA-B*51:01; TSPAN10; ENSG00000182612; TAA
LAFLVLEAV

SEQ ID NO: 91851 - protein, 9 aa, Homo sapiens
  Table A; Target 91851; HLA-B*54:01; TSPAN10; ENSG00000182612; TAA
LAFLVLEAV

SEQ ID NO: 91852 - protein, 9 aa, Homo sapiens
  Table A; Target 91852; HLA-B*56:01; TSPAN10; ENSG00000182612; TAA
LAFLVLEAV

SEQ ID NO: 91853 - protein, 9 aa, Homo sapiens
  Table A; Target 91853; HLA-C*02:02; TSPAN10; ENSG00000182612; TAA
LAFLVLEAV

SEQ ID NO: 91854 - protein, 10 aa, Homo sapiens
  Table A; Target 91854; HLA-A*02:04; TSPAN10; ENSG00000182612; TAA
LAIGLWGLAV

SEQ ID NO: 91855 - protein, 8 aa, Homo sapiens
  Table A; Target 91855; HLA-B*57:01; TSPAN10; ENSG00000182612; TAA
LALAIGLW

SEQ ID NO: 91856 - protein, 10 aa, Homo sapiens
  Table A; Target 91856; HLA-A*02:04; TSPAN10; ENSG00000182612; TAA
LALAIGLWGL

SEQ ID NO: 91857 - protein, 8 aa, Homo sapiens
  Table A; Target 91857; HLA-B*51:01; TSPAN10; ENSG00000182612; TAA
LALGGLVV

SEQ ID NO: 91858 - protein, 8 aa, Homo sapiens
  Table A; Target 91858; HLA-C*03:03; TSPAN10; ENSG00000182612; TAA
LALGGLVV

SEQ ID NO: 91859 - protein, 8 aa, Homo sapiens
  Table A; Target 91859; HLA-C*03:04; TSPAN10; ENSG00000182612; TAA
LALGGLVV

SEQ ID NO: 91860 - protein, 10 aa, Homo sapiens
  Table A; Target 91860; HLA-B*54:01; TSPAN10; ENSG00000182612; TAA
LALGGLVVSA

SEQ ID NO: 91861 - protein, 10 aa, Homo sapiens
  Table A; Target 91861; HLA-B*56:01; TSPAN10; ENSG00000182612; TAA
LALGGLVVSA

SEQ ID NO: 91862 - protein, 11 aa, Homo sapiens
  Table A; Target 91862; HLA-B*54:01; TSPAN10; ENSG00000182612; TAA
LALGGLVVSAA

SEQ ID NO: 91863 - protein, 11 aa, Homo sapiens
  Table A; Target 91863; HLA-B*56:01; TSPAN10; ENSG00000182612; TAA
LALGGLVVSAA

SEQ ID NO: 91864 - protein, 11 aa, Homo sapiens
  Table A; Target 91864; HLA-C*03:03; TSPAN10; ENSG00000182612; TAA
LAVKGSLGSDL

SEQ ID NO: 91865 - protein, 8 aa, Homo sapiens
  Table A; Target 91865; HLA-B*27:02; TSPAN10; ENSG00000182612; TAA
LDADAAQR

SEQ ID NO: 91866 - protein, 9 aa, Homo sapiens
  Table A; Target 91866; HLA-B*13:02; TSPAN10; ENSG00000182612; TAA
LDADAAQRV

SEQ ID NO: 91867 - protein, 9 aa, Homo sapiens
  Table A; Target 91867; HLA-B*37:01; TSPAN10; ENSG00000182612; TAA
LDADAAQRV

SEQ ID NO: 91868 - protein, 9 aa, Homo sapiens
  Table A; Target 91868; HLA-C*06:02; TSPAN10; ENSG00000182612; TAA
LDADAAQRV

SEQ ID NO: 91869 - protein, 9 aa, Homo sapiens
  Table A; Target 91869; HLA-C*12:03; TSPAN10; ENSG00000182612; TAA
LDADAAQRV

SEQ ID NO: 91870 - protein, 10 aa, Homo sapiens
  Table A; Target 91870; HLA-A*30:01; TSPAN10; ENSG00000182612; TAA
LDADAAQRVV

SEQ ID NO: 91871 - protein, 10 aa, Homo sapiens
  Table A; Target 91871; HLA-B*40:02; TSPAN10; ENSG00000182612; TAA
LDADAAQRVV

SEQ ID NO: 91872 - protein, 10 aa, Homo sapiens
  Table A; Target 91872; HLA-C*06:02; TSPAN10; ENSG00000182612; TAA
LDADAAQRVV

SEQ ID NO: 91873 - protein, 10 aa, Homo sapiens
  Table A; Target 91873; HLA-C*07:02; TSPAN10; ENSG00000182612; TAA
LDADAAQRVV

SEQ ID NO: 91874 - protein, 10 aa, Homo sapiens
  Table A; Target 91874; HLA-C*16:01; TSPAN10; ENSG00000182612; TAA
LDADAAQRVV

SEQ ID NO: 91875 - protein, 10 aa, Homo sapiens
  Table A; Target 91875; HLA-C*16:02; TSPAN10; ENSG00000182612; TAA
LDADAAQRVV

SEQ ID NO: 91876 - protein, 11 aa, Homo sapiens
  Table A; Target 91876; HLA-A*25:01; TSPAN10; ENSG00000182612; TAA
LDADAAQRVVY

SEQ ID NO: 91877 - protein, 11 aa, Homo sapiens
  Table A; Target 91877; HLA-A*29:02; TSPAN10; ENSG00000182612; TAA
LDADAAQRVVY

SEQ ID NO: 91878 - protein, 11 aa, Homo sapiens
  Table A; Target 91878; HLA-A*30:02; TSPAN10; ENSG00000182612; TAA
LDADAAQRVVY

SEQ ID NO: 91879 - protein, 11 aa, Homo sapiens
  Table A; Target 91879; HLA-A*32:01; TSPAN10; ENSG00000182612; TAA
LDADAAQRVVY

SEQ ID NO: 91880 - protein, 11 aa, Homo sapiens
  Table A; Target 91880; HLA-B*15:01; TSPAN10; ENSG00000182612; TAA
LDADAAQRVVY

SEQ ID NO: 91881 - protein, 11 aa, Homo sapiens
  Table A; Target 91881; HLA-B*15:03; TSPAN10; ENSG00000182612; TAA
LDADAAQRVVY

SEQ ID NO: 91882 - protein, 11 aa, Homo sapiens
  Table A; Target 91882; HLA-B*18:01; TSPAN10; ENSG00000182612; TAA
LDADAAQRVVY

SEQ ID NO: 91883 - protein, 11 aa, Homo sapiens
  Table A; Target 91883; HLA-B*27:02; TSPAN10; ENSG00000182612; TAA
LDADAAQRVVY

SEQ ID NO: 91884 - protein, 11 aa, Homo sapiens
  Table A; Target 91884; HLA-B*35:01; TSPAN10; ENSG00000182612; TAA
LDADAAQRVVY

SEQ ID NO: 91885 - protein, 11 aa, Homo sapiens
  Table A; Target 91885; HLA-B*44:02; TSPAN10; ENSG00000182612; TAA
LDADAAQRVVY

SEQ ID NO: 91886 - protein, 11 aa, Homo sapiens
  Table A; Target 91886; HLA-B*44:03; TSPAN10; ENSG00000182612; TAA
LDADAAQRVVY

SEQ ID NO: 91887 - protein, 11 aa, Homo sapiens
  Table A; Target 91887; HLA-B*57:01; TSPAN10; ENSG00000182612; TAA
LDADAAQRVVY

SEQ ID NO: 91888 - protein, 11 aa, Homo sapiens
  Table A; Target 91888; HLA-C*04:01; TSPAN10; ENSG00000182612; TAA
LDADAAQRVVY

SEQ ID NO: 91889 - protein, 11 aa, Homo sapiens
  Table A; Target 91889; HLA-C*07:01; TSPAN10; ENSG00000182612; TAA
LDADAAQRVVY

SEQ ID NO: 91890 - protein, 11 aa, Homo sapiens
  Table A; Target 91890; HLA-C*07:04; TSPAN10; ENSG00000182612; TAA
LDADAAQRVVY

SEQ ID NO: 91891 - protein, 11 aa, Homo sapiens
  Table A; Target 91891; HLA-C*12:03; TSPAN10; ENSG00000182612; TAA
LDADAAQRVVY

SEQ ID NO: 91892 - protein, 11 aa, Homo sapiens
  Table A; Target 91892; HLA-C*16:01; TSPAN10; ENSG00000182612; TAA
LDADAAQRVVY

SEQ ID NO: 91893 - protein, 11 aa, Homo sapiens
  Table A; Target 91893; HLA-C*16:04; TSPAN10; ENSG00000182612; TAA
LDADAAQRVVY

SEQ ID NO: 91894 - protein, 8 aa, Homo sapiens
  Table A; Target 91894; HLA-A*30:01; TSPAN10; ENSG00000182612; TAA
LEAVAGAL

SEQ ID NO: 91895 - protein, 8 aa, Homo sapiens
  Table A; Target 91895; HLA-B*18:01; TSPAN10; ENSG00000182612; TAA
LEAVAGAL

SEQ ID NO: 91896 - protein, 8 aa, Homo sapiens
  Table A; Target 91896; HLA-B*37:01; TSPAN10; ENSG00000182612; TAA
LEAVAGAL

SEQ ID NO: 91897 - protein, 8 aa, Homo sapiens
  Table A; Target 91897; HLA-B*40:01; TSPAN10; ENSG00000182612; TAA
LEAVAGAL

SEQ ID NO: 91898 - protein, 8 aa, Homo sapiens
  Table A; Target 91898; HLA-B*40:02; TSPAN10; ENSG00000182612; TAA
LEAVAGAL

SEQ ID NO: 91899 - protein, 8 aa, Homo sapiens
  Table A; Target 91899; HLA-B*49:01; TSPAN10; ENSG00000182612; TAA
LEAVAGAL

SEQ ID NO: 91900 - protein, 9 aa, Homo sapiens
  Table A; Target 91900; HLA-A*30:01; TSPAN10; ENSG00000182612; TAA
LEAVAGALV

SEQ ID NO: 91901 - protein, 9 aa, Homo sapiens
  Table A; Target 91901; HLA-B*18:01; TSPAN10; ENSG00000182612; TAA
LEAVAGALV

SEQ ID NO: 91902 - protein, 9 aa, Homo sapiens
  Table A; Target 91902; HLA-B*40:01; TSPAN10; ENSG00000182612; TAA
LEAVAGALV

SEQ ID NO: 91903 - protein, 9 aa, Homo sapiens
  Table A; Target 91903; HLA-B*40:02; TSPAN10; ENSG00000182612; TAA
LEAVAGALV

SEQ ID NO: 91904 - protein, 9 aa, Homo sapiens
  Table A; Target 91904; HLA-B*49:01; TSPAN10; ENSG00000182612; TAA
LEAVAGALV

SEQ ID NO: 91905 - protein, 10 aa, Homo sapiens
  Table A; Target 91905; HLA-A*30:01; TSPAN10; ENSG00000182612; TAA
LEAVAGALVV

SEQ ID NO: 91906 - protein, 10 aa, Homo sapiens
  Table A; Target 91906; HLA-B*40:01; TSPAN10; ENSG00000182612; TAA
LEAVAGALVV

SEQ ID NO: 91907 - protein, 10 aa, Homo sapiens
  Table A; Target 91907; HLA-B*40:02; TSPAN10; ENSG00000182612; TAA
LEAVAGALVV

SEQ ID NO: 91908 - protein, 10 aa, Homo sapiens
  Table A; Target 91908; HLA-B*49:01; TSPAN10; ENSG00000182612; TAA
LEAVAGALVV

SEQ ID NO: 91909 - protein, 11 aa, Homo sapiens
  Table A; Target 91909; HLA-A*30:01; TSPAN10; ENSG00000182612; TAA
LEAVAGALVVA

SEQ ID NO: 91910 - protein, 11 aa, Homo sapiens
  Table A; Target 91910; HLA-B*40:01; TSPAN10; ENSG00000182612; TAA
LEAVAGALVVA

SEQ ID NO: 91911 - protein, 11 aa, Homo sapiens
  Table A; Target 91911; HLA-B*49:01; TSPAN10; ENSG00000182612; TAA
LEAVAGALVVA

SEQ ID NO: 91912 - protein, 8 aa, Homo sapiens
  Table A; Target 91912; HLA-B*40:02; TSPAN10; ENSG00000182612; TAA
LEHTLRVA

SEQ ID NO: 91913 - protein, 9 aa, Homo sapiens
  Table A; Target 91913; HLA-A*30:01; TSPAN10; ENSG00000182612; TAA
LEHTLRVAI

SEQ ID NO: 91914 - protein, 9 aa, Homo sapiens
  Table A; Target 91914; HLA-B*18:01; TSPAN10; ENSG00000182612; TAA
LEHTLRVAI

SEQ ID NO: 91915 - protein, 9 aa, Homo sapiens
  Table A; Target 91915; HLA-B*37:01; TSPAN10; ENSG00000182612; TAA
LEHTLRVAI

SEQ ID NO: 91916 - protein, 9 aa, Homo sapiens
  Table A; Target 91916; HLA-B*40:01; TSPAN10; ENSG00000182612; TAA
LEHTLRVAI

SEQ ID NO: 91917 - protein, 9 aa, Homo sapiens
  Table A; Target 91917; HLA-B*40:02; TSPAN10; ENSG00000182612; TAA
LEHTLRVAI

SEQ ID NO: 91918 - protein, 9 aa, Homo sapiens
  Table A; Target 91918; HLA-B*44:02; TSPAN10; ENSG00000182612; TAA
LEHTLRVAI

SEQ ID NO: 91919 - protein, 9 aa, Homo sapiens
  Table A; Target 91919; HLA-B*44:03; TSPAN10; ENSG00000182612; TAA
LEHTLRVAI

SEQ ID NO: 91920 - protein, 9 aa, Homo sapiens
  Table A; Target 91920; HLA-B*49:01; TSPAN10; ENSG00000182612; TAA
LEHTLRVAI

SEQ ID NO: 91921 - protein, 8 aa, Homo sapiens
  Table A; Target 91921; HLA-B*54:01; TSPAN10; ENSG00000182612; TAA
LGGLVVSA

SEQ ID NO: 91922 - protein, 9 aa, Homo sapiens
  Table A; Target 91922; HLA-B*54:01; TSPAN10; ENSG00000182612; TAA
LGGLVVSAA

SEQ ID NO: 91923 - protein, 11 aa, Homo sapiens
  Table A; Target 91923; HLA-C*07:02; TSPAN10; ENSG00000182612; TAA
LGGLVVSAASL

SEQ ID NO: 91924 - protein, 9 aa, Homo sapiens
  Table A; Target 91924; HLA-C*03:04; TSPAN10; ENSG00000182612; TAA
LGSDLGGPL

SEQ ID NO: 91925 - protein, 9 aa, Homo sapiens
  Table A; Target 91925; HLA-B*57:01; TSPAN10; ENSG00000182612; TAA
LIFLSNFPF

SEQ ID NO: 91926 - protein, 9 aa, Homo sapiens
  Table A; Target 91926; HLA-A*02:01; TSPAN10; ENSG00000182612; TAA
LLAARLLGA

SEQ ID NO: 91927 - protein, 9 aa, Homo sapiens
  Table A; Target 91927; HLA-A*02:03; TSPAN10; ENSG00000182612; TAA
LLAARLLGA

SEQ ID NO: 91928 - protein, 9 aa, Homo sapiens
  Table A; Target 91928; HLA-A*02:04; TSPAN10; ENSG00000182612; TAA
LLAARLLGA

SEQ ID NO: 91929 - protein, 9 aa, Homo sapiens
  Table A; Target 91929; HLA-B*08:01; TSPAN10; ENSG00000182612; TAA
LLAARLLGA

SEQ ID NO: 91930 - protein, 9 aa, Homo sapiens
  Table A; Target 91930; HLA-B*55:01; TSPAN10; ENSG00000182612; TAA
LLAARLLGA

SEQ ID NO: 91931 - protein, 10 aa, Homo sapiens
  Table A; Target 91931; HLA-A*02:03; TSPAN10; ENSG00000182612; TAA
LLAARLLGAL

SEQ ID NO: 91932 - protein, 11 aa, Homo sapiens
  Table A; Target 91932; HLA-A*02:04; TSPAN10; ENSG00000182612; TAA
LLALAIGLWGL

SEQ ID NO: 91933 - protein, 9 aa, Homo sapiens
  Table A; Target 91933; HLA-A*01:01; TSPAN10; ENSG00000182612; TAA
LLDQVQLGL

SEQ ID NO: 91934 - protein, 9 aa, Homo sapiens
  Table A; Target 91934; HLA-A*02:01; TSPAN10; ENSG00000182612; TAA
LLDQVQLGL

SEQ ID NO: 91935 - protein, 9 aa, Homo sapiens
  Table A; Target 91935; HLA-A*02:04; TSPAN10; ENSG00000182612; TAA
LLDQVQLGL

SEQ ID NO: 91936 - protein, 9 aa, Homo sapiens
  Table A; Target 91936; HLA-A*02:07; TSPAN10; ENSG00000182612; TAA
LLDQVQLGL

SEQ ID NO: 91937 - protein, 9 aa, Homo sapiens
  Table A; Target 91937; HLA-A*68:02; TSPAN10; ENSG00000182612; TAA
LLDQVQLGL

SEQ ID NO: 91938 - protein, 9 aa, Homo sapiens
  Table A; Target 91938; HLA-B*13:02; TSPAN10; ENSG00000182612; TAA
LLDQVQLGL

SEQ ID NO: 91939 - protein, 9 aa, Homo sapiens
  Table A; Target 91939; HLA-B*38:01; TSPAN10; ENSG00000182612; TAA
LLDQVQLGL

SEQ ID NO: 91940 - protein, 9 aa, Homo sapiens
  Table A; Target 91940; HLA-C*05:01; TSPAN10; ENSG00000182612; TAA
LLDQVQLGL

SEQ ID NO: 91941 - protein, 8 aa, Homo sapiens
  Table A; Target 91941; HLA-B*27:02; TSPAN10; ENSG00000182612; TAA
LLGALAAR

SEQ ID NO: 91942 - protein, 10 aa, Homo sapiens
  Table A; Target 91942; HLA-A*02:01; TSPAN10; ENSG00000182612; TAA
LLLAARLLGA

SEQ ID NO: 91943 - protein, 10 aa, Homo sapiens
  Table A; Target 91943; HLA-A*02:03; TSPAN10; ENSG00000182612; TAA
LLLAARLLGA

SEQ ID NO: 91944 - protein, 10 aa, Homo sapiens
  Table A; Target 91944; HLA-A*02:04; TSPAN10; ENSG00000182612; TAA
LLLAARLLGA

SEQ ID NO: 91945 - protein, 9 aa, Homo sapiens
  Table A; Target 91945; HLA-A*02:01; TSPAN10; ENSG00000182612; TAA
LLQGAELLL

SEQ ID NO: 91946 - protein, 9 aa, Homo sapiens
  Table A; Target 91946; HLA-A*02:04; TSPAN10; ENSG00000182612; TAA
LLQGAELLL

SEQ ID NO: 91947 - protein, 10 aa, Homo sapiens
  Table A; Target 91947; HLA-A*02:03; TSPAN10; ENSG00000182612; TAA
LLQGAELLLA

SEQ ID NO: 91948 - protein, 10 aa, Homo sapiens
  Table A; Target 91948; HLA-A*02:04; TSPAN10; ENSG00000182612; TAA
LLQGAELLLA

SEQ ID NO: 91949 - protein, 9 aa, Homo sapiens
  Table A; Target 91949; HLA-B*07:02; TSPAN10; ENSG00000182612; TAA
LPTDPMLGL

SEQ ID NO: 91950 - protein, 9 aa, Homo sapiens
  Table A; Target 91950; HLA-B*35:01; TSPAN10; ENSG00000182612; TAA
LPTDPMLGL

SEQ ID NO: 91951 - protein, 9 aa, Homo sapiens
  Table A; Target 91951; HLA-B*35:03; TSPAN10; ENSG00000182612; TAA
LPTDPMLGL

SEQ ID NO: 91952 - protein, 9 aa, Homo sapiens
  Table A; Target 91952; HLA-B*51:01; TSPAN10; ENSG00000182612; TAA
LPTDPMLGL

SEQ ID NO: 91953 - protein, 9 aa, Homo sapiens
  Table A; Target 91953; HLA-B*54:01; TSPAN10; ENSG00000182612; TAA
LPTDPMLGL

SEQ ID NO: 91954 - protein, 9 aa, Homo sapiens
  Table A; Target 91954; HLA-B*55:01; TSPAN10; ENSG00000182612; TAA
LPTDPMLGL

SEQ ID NO: 91955 - protein, 9 aa, Homo sapiens
  Table A; Target 91955; HLA-B*56:01; TSPAN10; ENSG00000182612; TAA
LPTDPMLGL

SEQ ID NO: 91956 - protein, 9 aa, Homo sapiens
  Table A; Target 91956; HLA-C*03:04; TSPAN10; ENSG00000182612; TAA
LPTDPMLGL

SEQ ID NO: 91957 - protein, 9 aa, Homo sapiens
  Table A; Target 91957; HLA-C*07:02; TSPAN10; ENSG00000182612; TAA
LPTDPMLGL

SEQ ID NO: 91958 - protein, 10 aa, Homo sapiens
  Table A; Target 91958; HLA-B*56:01; TSPAN10; ENSG00000182612; TAA
LPTDPMLGLA

SEQ ID NO: 91959 - protein, 11 aa, Homo sapiens
  Table A; Target 91959; HLA-B*35:03; TSPAN10; ENSG00000182612; TAA
LPTDPMLGLAL

SEQ ID NO: 91960 - protein, 9 aa, Homo sapiens
  Table A; Target 91960; HLA-A*02:01; TSPAN10; ENSG00000182612; TAA
LQDSLEHTL

SEQ ID NO: 91961 - protein, 9 aa, Homo sapiens
  Table A; Target 91961; HLA-A*02:07; TSPAN10; ENSG00000182612; TAA
LQDSLEHTL

SEQ ID NO: 91962 - protein, 9 aa, Homo sapiens
  Table A; Target 91962; HLA-B*13:02; TSPAN10; ENSG00000182612; TAA
LQDSLEHTL

SEQ ID NO: 91963 - protein, 9 aa, Homo sapiens
  Table A; Target 91963; HLA-B*27:05; TSPAN10; ENSG00000182612; TAA
LQDSLEHTL

SEQ ID NO: 91964 - protein, 9 aa, Homo sapiens
  Table A; Target 91964; HLA-B*35:03; TSPAN10; ENSG00000182612; TAA
LQDSLEHTL

SEQ ID NO: 91965 - protein, 9 aa, Homo sapiens
  Table A; Target 91965; HLA-B*38:01; TSPAN10; ENSG00000182612; TAA
LQDSLEHTL

SEQ ID NO: 91966 - protein, 9 aa, Homo sapiens
  Table A; Target 91966; HLA-B*39:01; TSPAN10; ENSG00000182612; TAA
LQDSLEHTL

SEQ ID NO: 91967 - protein, 9 aa, Homo sapiens
  Table A; Target 91967; HLA-B*40:01; TSPAN10; ENSG00000182612; TAA
LQDSLEHTL

SEQ ID NO: 91968 - protein, 9 aa, Homo sapiens
  Table A; Target 91968; HLA-C*05:01; TSPAN10; ENSG00000182612; TAA
LQDSLEHTL

SEQ ID NO: 91969 - protein, 11 aa, Homo sapiens
  Table A; Target 91969; HLA-A*30:02; TSPAN10; ENSG00000182612; TAA
LRANLAASGGY

SEQ ID NO: 91970 - protein, 11 aa, Homo sapiens
  Table A; Target 91970; HLA-B*27:02; TSPAN10; ENSG00000182612; TAA
LRANLAASGGY

SEQ ID NO: 91971 - protein, 11 aa, Homo sapiens
  Table A; Target 91971; HLA-C*16:04; TSPAN10; ENSG00000182612; TAA
LRANLAASGGY

SEQ ID NO: 91972 - protein, 10 aa, Homo sapiens
  Table A; Target 91972; HLA-B*27:02; TSPAN10; ENSG00000182612; TAA
LRLDADAAQR

SEQ ID NO: 91973 - protein, 10 aa, Homo sapiens
  Table A; Target 91973; HLA-B*27:05; TSPAN10; ENSG00000182612; TAA
LRLDADAAQR

SEQ ID NO: 91974 - protein, 8 aa, Homo sapiens
  Table A; Target 91974; HLA-C*07:01; TSPAN10; ENSG00000182612; TAA
LRVAIAHY

SEQ ID NO: 91975 - protein, 9 aa, Homo sapiens
  Table A; Target 91975; HLA-B*57:01; TSPAN10; ENSG00000182612; TAA
LSNFPFSLL

SEQ ID NO: 91976 - protein, 9 aa, Homo sapiens
  Table A; Target 91976; HLA-A*03:02; TSPAN10; ENSG00000182612; TAA
LSQETAGQK

SEQ ID NO: 91977 - protein, 9 aa, Homo sapiens
  Table A; Target 91977; HLA-A*11:01; TSPAN10; ENSG00000182612; TAA
LSQETAGQK

SEQ ID NO: 91978 - protein, 8 aa, Homo sapiens
  Table A; Target 91978; HLA-B*39:01; TSPAN10; ENSG00000182612; TAA
LVLEAVAG

SEQ ID NO: 91979 - protein, 9 aa, Homo sapiens
  Table A; Target 91979; HLA-A*02:01; TSPAN10; ENSG00000182612; TAA
LVLEAVAGA

SEQ ID NO: 91980 - protein, 9 aa, Homo sapiens
  Table A; Target 91980; HLA-A*02:03; TSPAN10; ENSG00000182612; TAA
LVLEAVAGA

SEQ ID NO: 91981 - protein, 9 aa, Homo sapiens
  Table A; Target 91981; HLA-A*02:04; TSPAN10; ENSG00000182612; TAA
LVLEAVAGA

SEQ ID NO: 91982 - protein, 9 aa, Homo sapiens
  Table A; Target 91982; HLA-A*02:07; TSPAN10; ENSG00000182612; TAA
LVLEAVAGA

SEQ ID NO: 91983 - protein, 9 aa, Homo sapiens
  Table A; Target 91983; HLA-B*54:01; TSPAN10; ENSG00000182612; TAA
LVLEAVAGA

SEQ ID NO: 91984 - protein, 9 aa, Homo sapiens
  Table A; Target 91984; HLA-B*55:01; TSPAN10; ENSG00000182612; TAA
LVLEAVAGA

SEQ ID NO: 91985 - protein, 9 aa, Homo sapiens
  Table A; Target 91985; HLA-B*56:01; TSPAN10; ENSG00000182612; TAA
LVLEAVAGA

SEQ ID NO: 91986 - protein, 10 aa, Homo sapiens
  Table A; Target 91986; HLA-C*03:03; TSPAN10; ENSG00000182612; TAA
LVLEAVAGAL

SEQ ID NO: 91987 - protein, 10 aa, Homo sapiens
  Table A; Target 91987; HLA-C*03:04; TSPAN10; ENSG00000182612; TAA
LVLEAVAGAL

SEQ ID NO: 91988 - protein, 11 aa, Homo sapiens
  Table A; Target 91988; HLA-A*02:01; TSPAN10; ENSG00000182612; TAA
LVLEAVAGALV

SEQ ID NO: 91989 - protein, 8 aa, Homo sapiens
  Table A; Target 91989; HLA-B*35:03; TSPAN10; ENSG00000182612; TAA
LVVSAASL

SEQ ID NO: 91990 - protein, 8 aa, Homo sapiens
  Table A; Target 91990; HLA-C*01:02; TSPAN10; ENSG00000182612; TAA
LVVSAASL

SEQ ID NO: 91991 - protein, 8 aa, Homo sapiens
  Table A; Target 91991; HLA-C*03:03; TSPAN10; ENSG00000182612; TAA
LVVSAASL

SEQ ID NO: 91992 - protein, 8 aa, Homo sapiens
  Table A; Target 91992; HLA-C*03:04; TSPAN10; ENSG00000182612; TAA
LVVSAASL

SEQ ID NO: 91993 - protein, 8 aa, Homo sapiens
  Table A; Target 91993; HLA-C*14:02; TSPAN10; ENSG00000182612; TAA
LVVSAASL

SEQ ID NO: 91994 - protein, 9 aa, Homo sapiens
  Table A; Target 91994; HLA-B*40:01; TSPAN10; ENSG00000182612; TAA
MEEGERSPL

SEQ ID NO: 91995 - protein, 10 aa, Homo sapiens
  Table A; Target 91995; HLA-A*30:01; TSPAN10; ENSG00000182612; TAA
MEEGERSPLL

SEQ ID NO: 91996 - protein, 10 aa, Homo sapiens
  Table A; Target 91996; HLA-B*37:01; TSPAN10; ENSG00000182612; TAA
MEEGERSPLL

SEQ ID NO: 91997 - protein, 10 aa, Homo sapiens
  Table A; Target 91997; HLA-B*40:01; TSPAN10; ENSG00000182612; TAA
MEEGERSPLL

SEQ ID NO: 91998 - protein, 10 aa, Homo sapiens
  Table A; Target 91998; HLA-B*44:02; TSPAN10; ENSG00000182612; TAA
MEEGERSPLL

SEQ ID NO: 91999 - protein, 10 aa, Homo sapiens
  Table A; Target 91999; HLA-B*49:01; TSPAN10; ENSG00000182612; TAA
MEEGERSPLL

SEQ ID NO: 92000 - protein, 9 aa, Homo sapiens
  Table A; Target 92000; HLA-C*01:02; TSPAN10; ENSG00000182612; TAA
NFPFSLLGL

SEQ ID NO: 92001 - protein, 8 aa, Homo sapiens
  Table A; Target 92001; HLA-A*32:01; TSPAN10; ENSG00000182612; TAA
NLAASGGY

SEQ ID NO: 92002 - protein, 8 aa, Homo sapiens
  Table A; Target 92002; HLA-B*15:03; TSPAN10; ENSG00000182612; TAA
NLAASGGY

SEQ ID NO: 92003 - protein, 8 aa, Homo sapiens
  Table A; Target 92003; HLA-B*39:01; TSPAN10; ENSG00000182612; TAA
NLAASGGY

SEQ ID NO: 92004 - protein, 10 aa, Homo sapiens
  Table A; Target 92004; HLA-B*38:01; TSPAN10; ENSG00000182612; TAA
NLAASGGYAI

SEQ ID NO: 92005 - protein, 10 aa, Homo sapiens
  Table A; Target 92005; HLA-B*39:01; TSPAN10; ENSG00000182612; TAA
NLAASGGYAI

SEQ ID NO: 92006 - protein, 8 aa, Homo sapiens
  Table A; Target 92006; HLA-B*37:01; TSPAN10; ENSG00000182612; TAA
PETKHQAL

SEQ ID NO: 92007 - protein, 8 aa, Homo sapiens
  Table A; Target 92007; HLA-B*40:02; TSPAN10; ENSG00000182612; TAA
PETKHQAL

SEQ ID NO: 92008 - protein, 8 aa, Homo sapiens
  Table A; Target 92008; HLA-C*07:02; TSPAN10; ENSG00000182612; TAA
PETKHQAL

SEQ ID NO: 92009 - protein, 9 aa, Homo sapiens
  Table A; Target 92009; HLA-B*07:02; TSPAN10; ENSG00000182612; TAA
PGAPPAAKP

SEQ ID NO: 92010 - protein, 9 aa, Homo sapiens
  Table A; Target 92010; HLA-C*06:02; TSPAN10; ENSG00000182612; TAA
PGAPPAAKP

SEQ ID NO: 92011 - protein, 9 aa, Homo sapiens
  Table A; Target 92011; HLA-C*07:02; TSPAN10; ENSG00000182612; TAA
PGAPPAAKP

SEQ ID NO: 92012 - protein, 8 aa, Homo sapiens
  Table A; Target 92012; HLA-C*07:01; TSPAN10; ENSG00000182612; TAA
PGSSCVKY

SEQ ID NO: 92013 - protein, 9 aa, Homo sapiens
  Table A; Target 92013; HLA-B*07:02; TSPAN10; ENSG00000182612; TAA
PKKGPAPSL

SEQ ID NO: 92014 - protein, 9 aa, Homo sapiens
  Table A; Target 92014; HLA-B*15:03; TSPAN10; ENSG00000182612; TAA
PKKGPAPSL

SEQ ID NO: 92015 - protein, 9 aa, Homo sapiens
  Table A; Target 92015; HLA-C*07:02; TSPAN10; ENSG00000182612; TAA
PKKGPAPSL

SEQ ID NO: 92016 - protein, 11 aa, Homo sapiens
  Table A; Target 92016; HLA-C*07:01; TSPAN10; ENSG00000182612; TAA
PLLSQETAGQK

SEQ ID NO: 92017 - protein, 10 aa, Homo sapiens
  Table A; Target 92017; HLA-C*06:02; TSPAN10; ENSG00000182612; TAA
PLQDSLEHTL

SEQ ID NO: 92018 - protein, 10 aa, Homo sapiens
  Table A; Target 92018; HLA-C*07:02; TSPAN10; ENSG00000182612; TAA
PLQDSLEHTL

SEQ ID NO: 92019 - protein, 9 aa, Homo sapiens
  Table A; Target 92019; HLA-B*07:02; TSPAN10; ENSG00000182612; TAA
PPETKHQAL

SEQ ID NO: 92020 - protein, 10 aa, Homo sapiens
  Table A; Target 92020; HLA-C*07:02; TSPAN10; ENSG00000182612; TAA
PSPGAPPAAK

SEQ ID NO: 92021 - protein, 11 aa, Homo sapiens
  Table A; Target 92021; HLA-C*07:02; TSPAN10; ENSG00000182612; TAA
PSPGAPPAAKP

SEQ ID NO: 92022 - protein, 8 aa, Homo sapiens
  Table A; Target 92022; HLA-A*03:01; TSPAN10; ENSG00000182612; TAA
QALSGTPK

SEQ ID NO: 92023 - protein, 8 aa, Homo sapiens
  Table A; Target 92023; HLA-A*03:02; TSPAN10; ENSG00000182612; TAA
QALSGTPK

SEQ ID NO: 92024 - protein, 8 aa, Homo sapiens
  Table A; Target 92024; HLA-A*11:01; TSPAN10; ENSG00000182612; TAA
QALSGTPK

SEQ ID NO: 92025 - protein, 8 aa, Homo sapiens
  Table A; Target 92025; HLA-A*33:01; TSPAN10; ENSG00000182612; TAA
QALSGTPK

SEQ ID NO: 92026 - protein, 9 aa, Homo sapiens
  Table A; Target 92026; HLA-A*03:02; TSPAN10; ENSG00000182612; TAA
QALSGTPKK

SEQ ID NO: 92027 - protein, 9 aa, Homo sapiens
  Table A; Target 92027; HLA-A*11:01; TSPAN10; ENSG00000182612; TAA
QALSGTPKK

SEQ ID NO: 92028 - protein, 9 aa, Homo sapiens
  Table A; Target 92028; HLA-B*38:01; TSPAN10; ENSG00000182612; TAA
QDDPDLRFL

SEQ ID NO: 92029 - protein, 9 aa, Homo sapiens
  Table A; Target 92029; HLA-B*40:01; TSPAN10; ENSG00000182612; TAA
QDDPDLRFL

SEQ ID NO: 92030 - protein, 10 aa, Homo sapiens
  Table A; Target 92030; HLA-B*38:01; TSPAN10; ENSG00000182612; TAA
QDDPDLRFLL

SEQ ID NO: 92031 - protein, 8 aa, Homo sapiens
  Table A; Target 92031; HLA-B*37:01; TSPAN10; ENSG00000182612; TAA
QDSLEHTL

SEQ ID NO: 92032 - protein, 8 aa, Homo sapiens
  Table A; Target 92032; HLA-B*38:01; TSPAN10; ENSG00000182612; TAA
QDSLEHTL

SEQ ID NO: 92033 - protein, 9 aa, Homo sapiens
  Table A; Target 92033; HLA-B*44:02; TSPAN10; ENSG00000182612; TAA
QDWQQNLYF

SEQ ID NO: 92034 - protein, 9 aa, Homo sapiens
  Table A; Target 92034; HLA-B*44:03; TSPAN10; ENSG00000182612; TAA
QDWQQNLYF

SEQ ID NO: 92035 - protein, 9 aa, Homo sapiens
  Table A; Target 92035; HLA-A*30:01; TSPAN10; ENSG00000182612; TAA
QETAGQKPL

SEQ ID NO: 92036 - protein, 9 aa, Homo sapiens
  Table A; Target 92036; HLA-B*37:01; TSPAN10; ENSG00000182612; TAA
QETAGQKPL

SEQ ID NO: 92037 - protein, 9 aa, Homo sapiens
  Table A; Target 92037; HLA-B*40:01; TSPAN10; ENSG00000182612; TAA
QETAGQKPL

SEQ ID NO: 92038 - protein, 9 aa, Homo sapiens
  Table A; Target 92038; HLA-B*40:02; TSPAN10; ENSG00000182612; TAA
QETAGQKPL

SEQ ID NO: 92039 - protein, 9 aa, Homo sapiens
  Table A; Target 92039; HLA-B*44:02; TSPAN10; ENSG00000182612; TAA
QETAGQKPL

SEQ ID NO: 92040 - protein, 9 aa, Homo sapiens
  Table A; Target 92040; HLA-B*44:03; TSPAN10; ENSG00000182612; TAA
QETAGQKPL

SEQ ID NO: 92041 - protein, 9 aa, Homo sapiens
  Table A; Target 92041; HLA-B*49:01; TSPAN10; ENSG00000182612; TAA
QETAGQKPL

SEQ ID NO: 92042 - protein, 9 aa, Homo sapiens
  Table A; Target 92042; HLA-C*07:01; TSPAN10; ENSG00000182612; TAA
QETAGQKPL

SEQ ID NO: 92043 - protein, 9 aa, Homo sapiens
  Table A; Target 92043; HLA-C*16:02; TSPAN10; ENSG00000182612; TAA
QETAGQKPL

SEQ ID NO: 92044 - protein, 9 aa, Homo sapiens
  Table A; Target 92044; HLA-C*16:04; TSPAN10; ENSG00000182612; TAA
QETAGQKPL

SEQ ID NO: 92045 - protein, 11 aa, Homo sapiens
  Table A; Target 92045; HLA-B*49:01; TSPAN10; ENSG00000182612; TAA
QETAGQKPLSV

SEQ ID NO: 92046 - protein, 9 aa, Homo sapiens
  Table A; Target 92046; HLA-B*54:01; TSPAN10; ENSG00000182612; TAA
QGAELLLAA

SEQ ID NO: 92047 - protein, 9 aa, Homo sapiens
  Table A; Target 92047; HLA-B*56:01; TSPAN10; ENSG00000182612; TAA
QGAELLLAA

SEQ ID NO: 92048 - protein, 10 aa, Homo sapiens
  Table A; Target 92048; HLA-A*31:01; TSPAN10; ENSG00000182612; TAA
QGAELLLAAR

SEQ ID NO: 92049 - protein, 10 aa, Homo sapiens
  Table A; Target 92049; HLA-A*33:03; TSPAN10; ENSG00000182612; TAA
QGAELLLAAR

SEQ ID NO: 92050 - protein, 10 aa, Homo sapiens
  Table A; Target 92050; HLA-A*68:01; TSPAN10; ENSG00000182612; TAA
QGAELLLAAR

SEQ ID NO: 92051 - protein, 10 aa, Homo sapiens
  Table A; Target 92051; HLA-B*27:02; TSPAN10; ENSG00000182612; TAA
QGAELLLAAR

SEQ ID NO: 92052 - protein, 10 aa, Homo sapiens
  Table A; Target 92052; HLA-C*07:06; TSPAN10; ENSG00000182612; TAA
QGAELLLAAR

SEQ ID NO: 92053 - protein, 10 aa, Homo sapiens
  Table A; Target 92053; HLA-A*30:02; TSPAN10; ENSG00000182612; TAA
RANLAASGGY

SEQ ID NO: 92054 - protein, 10 aa, Homo sapiens
  Table A; Target 92054; HLA-B*15:01; TSPAN10; ENSG00000182612; TAA
RANLAASGGY

SEQ ID NO: 92055 - protein, 10 aa, Homo sapiens
  Table A; Target 92055; HLA-B*15:03; TSPAN10; ENSG00000182612; TAA
RANLAASGGY

SEQ ID NO: 92056 - protein, 10 aa, Homo sapiens
  Table A; Target 92056; HLA-B*27:02; TSPAN10; ENSG00000182612; TAA
RANLAASGGY

SEQ ID NO: 92057 - protein, 10 aa, Homo sapiens
  Table A; Target 92057; HLA-B*46:01; TSPAN10; ENSG00000182612; TAA
RANLAASGGY

SEQ ID NO: 92058 - protein, 10 aa, Homo sapiens
  Table A; Target 92058; HLA-B*58:01; TSPAN10; ENSG00000182612; TAA
RANLAASGGY

SEQ ID NO: 92059 - protein, 10 aa, Homo sapiens
  Table A; Target 92059; HLA-C*16:04; TSPAN10; ENSG00000182612; TAA
RANLAASGGY

SEQ ID NO: 92060 - protein, 9 aa, Homo sapiens
  Table A; Target 92060; HLA-A*23:01; TSPAN10; ENSG00000182612; TAA
RFLLDQVQL

SEQ ID NO: 92061 - protein, 9 aa, Homo sapiens
  Table A; Target 92061; HLA-A*24:02; TSPAN10; ENSG00000182612; TAA
RFLLDQVQL

SEQ ID NO: 92062 - protein, 8 aa, Homo sapiens
  Table A; Target 92062; HLA-C*03:04; TSPAN10; ENSG00000182612; TAA
RGFSGGIL

SEQ ID NO: 92063 - protein, 9 aa, Homo sapiens
  Table A; Target 92063; HLA-B*56:01; TSPAN10; ENSG00000182612; TAA
RGFSGGILA

SEQ ID NO: 92064 - protein, 10 aa, Homo sapiens
  Table A; Target 92064; HLA-A*23:01; TSPAN10; ENSG00000182612; TAA
RGFSGGILAF

SEQ ID NO: 92065 - protein, 10 aa, Homo sapiens
  Table A; Target 92065; HLA-B*46:01; TSPAN10; ENSG00000182612; TAA
RGFSGGILAF

SEQ ID NO: 92066 - protein, 10 aa, Homo sapiens
  Table A; Target 92066; HLA-B*57:01; TSPAN10; ENSG00000182612; TAA
RGFSGGILAF

SEQ ID NO: 92067 - protein, 10 aa, Homo sapiens
  Table A; Target 92067; HLA-B*58:01; TSPAN10; ENSG00000182612; TAA
RGFSGGILAF

SEQ ID NO: 92068 - protein, 10 aa, Homo sapiens
  Table A; Target 92068; HLA-C*02:02; TSPAN10; ENSG00000182612; TAA
RGFSGGILAF

SEQ ID NO: 92069 - protein, 11 aa, Homo sapiens
  Table A; Target 92069; HLA-A*02:04; TSPAN10; ENSG00000182612; TAA
RGFSGGILAFL

SEQ ID NO: 92070 - protein, 11 aa, Homo sapiens
  Table A; Target 92070; HLA-A*31:01; TSPAN10; ENSG00000182612; TAA
RGFSGGILAFL

SEQ ID NO: 92071 - protein, 9 aa, Homo sapiens
  Table A; Target 92071; HLA-A*03:02; TSPAN10; ENSG00000182612; TAA
RLDADAAQR

SEQ ID NO: 92072 - protein, 10 aa, Homo sapiens
  Table A; Target 92072; HLA-A*02:01; TSPAN10; ENSG00000182612; TAA
RLDADAAQRV

SEQ ID NO: 92073 - protein, 10 aa, Homo sapiens
  Table A; Target 92073; HLA-A*02:07; TSPAN10; ENSG00000182612; TAA
RLDADAAQRV

SEQ ID NO: 92074 - protein, 11 aa, Homo sapiens
  Table A; Target 92074; HLA-A*02:01; TSPAN10; ENSG00000182612; TAA
RLDADAAQRVV

SEQ ID NO: 92075 - protein, 11 aa, Homo sapiens
  Table A; Target 92075; HLA-A*02:03; TSPAN10; ENSG00000182612; TAA
RLDADAAQRVV

SEQ ID NO: 92076 - protein, 11 aa, Homo sapiens
  Table A; Target 92076; HLA-A*02:07; TSPAN10; ENSG00000182612; TAA
RLDADAAQRVV

SEQ ID NO: 92077 - protein, 11 aa, Homo sapiens
  Table A; Target 92077; HLA-A*30:01; TSPAN10; ENSG00000182612; TAA
RLDADAAQRVV

SEQ ID NO: 92078 - protein, 11 aa, Homo sapiens
  Table A; Target 92078; HLA-B*55:01; TSPAN10; ENSG00000182612; TAA
RLDADAAQRVV

SEQ ID NO: 92079 - protein, 9 aa, Homo sapiens
  Table A; Target 92079; HLA-A*02:04; TSPAN10; ENSG00000182612; TAA
RLLGALAAR

SEQ ID NO: 92080 - protein, 9 aa, Homo sapiens
  Table A; Target 92080; HLA-A*02:07; TSPAN10; ENSG00000182612; TAA
RLLGALAAR

SEQ ID NO: 92081 - protein, 9 aa, Homo sapiens
  Table A; Target 92081; HLA-A*03:01; TSPAN10; ENSG00000182612; TAA
RLLGALAAR

SEQ ID NO: 92082 - protein, 9 aa, Homo sapiens
  Table A; Target 92082; HLA-A*03:02; TSPAN10; ENSG00000182612; TAA
RLLGALAAR

SEQ ID NO: 92083 - protein, 9 aa, Homo sapiens
  Table A; Target 92083; HLA-A*11:01; TSPAN10; ENSG00000182612; TAA
RLLGALAAR

SEQ ID NO: 92084 - protein, 9 aa, Homo sapiens
  Table A; Target 92084; HLA-A*29:02; TSPAN10; ENSG00000182612; TAA
RLLGALAAR

SEQ ID NO: 92085 - protein, 9 aa, Homo sapiens
  Table A; Target 92085; HLA-A*31:01; TSPAN10; ENSG00000182612; TAA
RLLGALAAR

SEQ ID NO: 92086 - protein, 9 aa, Homo sapiens
  Table A; Target 92086; HLA-A*33:01; TSPAN10; ENSG00000182612; TAA
RLLGALAAR

SEQ ID NO: 92087 - protein, 9 aa, Homo sapiens
  Table A; Target 92087; HLA-A*33:03; TSPAN10; ENSG00000182612; TAA
RLLGALAAR

SEQ ID NO: 92088 - protein, 9 aa, Homo sapiens
  Table A; Target 92088; HLA-B*57:01; TSPAN10; ENSG00000182612; TAA
RLLGALAAR

SEQ ID NO: 92089 - protein, 8 aa, Homo sapiens
  Table A; Target 92089; HLA-B*07:02; TSPAN10; ENSG00000182612; TAA
RPPTSGCL

SEQ ID NO: 92090 - protein, 8 aa, Homo sapiens
  Table A; Target 92090; HLA-C*07:02; TSPAN10; ENSG00000182612; TAA
RPPTSGCL

SEQ ID NO: 92091 - protein, 9 aa, Homo sapiens
  Table A; Target 92091; HLA-B*58:01; TSPAN10; ENSG00000182612; TAA
RSPLLSQET

SEQ ID NO: 92092 - protein, 9 aa, Homo sapiens
  Table A; Target 92092; HLA-B*07:02; TSPAN10; ENSG00000182612; TAA
SAASLAGCL

SEQ ID NO: 92093 - protein, 9 aa, Homo sapiens
  Table A; Target 92093; HLA-B*27:05; TSPAN10; ENSG00000182612; TAA
SAASLAGCL

SEQ ID NO: 92094 - protein, 9 aa, Homo sapiens
  Table A; Target 92094; HLA-B*35:03; TSPAN10; ENSG00000182612; TAA
SAASLAGCL

SEQ ID NO: 92095 - protein, 9 aa, Homo sapiens
  Table A; Target 92095; HLA-B*39:01; TSPAN10; ENSG00000182612; TAA
SAASLAGCL

SEQ ID NO: 92096 - protein, 9 aa, Homo sapiens
  Table A; Target 92096; HLA-B*40:01; TSPAN10; ENSG00000182612; TAA
SAASLAGCL

SEQ ID NO: 92097 - protein, 9 aa, Homo sapiens
  Table A; Target 92097; HLA-C*02:02; TSPAN10; ENSG00000182612; TAA
SAASLAGCL

SEQ ID NO: 92098 - protein, 9 aa, Homo sapiens
  Table A; Target 92098; HLA-C*03:03; TSPAN10; ENSG00000182612; TAA
SAASLAGCL

SEQ ID NO: 92099 - protein, 9 aa, Homo sapiens
  Table A; Target 92099; HLA-C*03:04; TSPAN10; ENSG00000182612; TAA
SAASLAGCL

SEQ ID NO: 92100 - protein, 9 aa, Homo sapiens
  Table A; Target 92100; HLA-C*06:02; TSPAN10; ENSG00000182612; TAA
SAASLAGCL

SEQ ID NO: 92101 - protein, 9 aa, Homo sapiens
  Table A; Target 92101; HLA-C*07:06; TSPAN10; ENSG00000182612; TAA
SAASLAGCL

SEQ ID NO: 92102 - protein, 9 aa, Homo sapiens
  Table A; Target 92102; HLA-C*12:03; TSPAN10; ENSG00000182612; TAA
SAASLAGCL

SEQ ID NO: 92103 - protein, 9 aa, Homo sapiens
  Table A; Target 92103; HLA-C*16:01; TSPAN10; ENSG00000182612; TAA
SAASLAGCL

SEQ ID NO: 92104 - protein, 9 aa, Homo sapiens
  Table A; Target 92104; HLA-C*16:02; TSPAN10; ENSG00000182612; TAA
SAASLAGCL

SEQ ID NO: 92105 - protein, 8 aa, Homo sapiens
  Table A; Target 92105; HLA-C*06:02; TSPAN10; ENSG00000182612; TAA
SGGYAIAV

SEQ ID NO: 92106 - protein, 8 aa, Homo sapiens
  Table A; Target 92106; HLA-C*07:04; TSPAN10; ENSG00000182612; TAA
SGGYAIAV

SEQ ID NO: 92107 - protein, 9 aa, Homo sapiens
  Table A; Target 92107; HLA-A*02:03; TSPAN10; ENSG00000182612; TAA
SLAGCLGAL

SEQ ID NO: 92108 - protein, 9 aa, Homo sapiens
  Table A; Target 92108; HLA-B*07:02; TSPAN10; ENSG00000182612; TAA
SLAGCLGAL

SEQ ID NO: 92109 - protein, 9 aa, Homo sapiens
  Table A; Target 92109; HLA-C*01:02; TSPAN10; ENSG00000182612; TAA
SLAGCLGAL

SEQ ID NO: 92110 - protein, 9 aa, Homo sapiens
  Table A; Target 92110; HLA-C*07:02; TSPAN10; ENSG00000182612; TAA
SLAGCLGAL

SEQ ID NO: 92111 - protein, 8 aa, Homo sapiens
  Table A; Target 92111; HLA-A*02:04; TSPAN10; ENSG00000182612; TAA
SLLGLLAL

SEQ ID NO: 92112 - protein, 9 aa, Homo sapiens
  Table A; Target 92112; HLA-A*02:01; TSPAN10; ENSG00000182612; TAA
SLLGLLALA

SEQ ID NO: 92113 - protein, 9 aa, Homo sapiens
  Table A; Target 92113; HLA-A*02:04; TSPAN10; ENSG00000182612; TAA
SLLGLLALA

SEQ ID NO: 92114 - protein, 9 aa, Homo sapiens
  Table A; Target 92114; HLA-A*02:03; TSPAN10; ENSG00000182612; TAA
SLSPGSSCV

SEQ ID NO: 92115 - protein, 9 aa, Homo sapiens
  Table A; Target 92115; HLA-B*13:02; TSPAN10; ENSG00000182612; TAA
SLSPGSSCV

SEQ ID NO: 92116 - protein, 10 aa, Homo sapiens
  Table A; Target 92116; HLA-A*03:01; TSPAN10; ENSG00000182612; TAA
SLSPGSSCVK

SEQ ID NO: 92117 - protein, 10 aa, Homo sapiens
  Table A; Target 92117; HLA-A*03:02; TSPAN10; ENSG00000182612; TAA
SLSPGSSCVK

SEQ ID NO: 92118 - protein, 11 aa, Homo sapiens
  Table A; Target 92118; HLA-A*29:02; TSPAN10; ENSG00000182612; TAA
SLSPGSSCVKY

SEQ ID NO: 92119 - protein, 11 aa, Homo sapiens
  Table A; Target 92119; HLA-A*30:02; TSPAN10; ENSG00000182612; TAA
SLSPGSSCVKY

SEQ ID NO: 92120 - protein, 8 aa, Homo sapiens
  Table A; Target 92120; HLA-B*55:01; TSPAN10; ENSG00000182612; TAA
SPGAPPAA

SEQ ID NO: 92121 - protein, 8 aa, Homo sapiens
  Table A; Target 92121; HLA-B*56:01; TSPAN10; ENSG00000182612; TAA
SPGAPPAA

SEQ ID NO: 92122 - protein, 9 aa, Homo sapiens
  Table A; Target 92122; HLA-A*03:02; TSPAN10; ENSG00000182612; TAA
SPGAPPAAK

SEQ ID NO: 92123 - protein, 10 aa, Homo sapiens
  Table A; Target 92123; HLA-B*07:02; TSPAN10; ENSG00000182612; TAA
SPGAPPAAKP

SEQ ID NO: 92124 - protein, 9 aa, Homo sapiens
  Table A; Target 92124; HLA-B*35:01; TSPAN10; ENSG00000182612; TAA
SPGSSCVKY

SEQ ID NO: 92125 - protein, 9 aa, Homo sapiens
  Table A; Target 92125; HLA-B*55:01; TSPAN10; ENSG00000182612; TAA
SPGSSCVKY

SEQ ID NO: 92126 - protein, 9 aa, Homo sapiens
  Table A; Target 92126; HLA-C*03:03; TSPAN10; ENSG00000182612; TAA
SPGSSCVKY

SEQ ID NO: 92127 - protein, 9 aa, Homo sapiens
  Table A; Target 92127; HLA-C*07:01; TSPAN10; ENSG00000182612; TAA
SPGSSCVKY

SEQ ID NO: 92128 - protein, 9 aa, Homo sapiens
  Table A; Target 92128; HLA-B*07:02; TSPAN10; ENSG00000182612; TAA
SPGVQACSL

SEQ ID NO: 92129 - protein, 9 aa, Homo sapiens
  Table A; Target 92129; HLA-B*08:01; TSPAN10; ENSG00000182612; TAA
SPGVQACSL

SEQ ID NO: 92130 - protein, 9 aa, Homo sapiens
  Table A; Target 92130; HLA-B*35:03; TSPAN10; ENSG00000182612; TAA
SPGVQACSL

SEQ ID NO: 92131 - protein, 9 aa, Homo sapiens
  Table A; Target 92131; HLA-C*07:02; TSPAN10; ENSG00000182612; TAA
SPGVQACSL

SEQ ID NO: 92132 - protein, 9 aa, Homo sapiens
  Table A; Target 92132; HLA-B*54:01; TSPAN10; ENSG00000182612; TAA
SPLLSQETA

SEQ ID NO: 92133 - protein, 9 aa, Homo sapiens
  Table A; Target 92133; HLA-B*55:01; TSPAN10; ENSG00000182612; TAA
SPLLSQETA

SEQ ID NO: 92134 - protein, 9 aa, Homo sapiens
  Table A; Target 92134; HLA-B*56:01; TSPAN10; ENSG00000182612; TAA
SPLLSQETA

SEQ ID NO: 92135 - protein, 10 aa, Homo sapiens
  Table A; Target 92135; HLA-B*56:01; TSPAN10; ENSG00000182612; TAA
SPLLSQETAG

SEQ ID NO: 92136 - protein, 9 aa, Homo sapiens
  Table A; Target 92136; HLA-B*07:02; TSPAN10; ENSG00000182612; TAA
SPSPGAPPA

SEQ ID NO: 92137 - protein, 9 aa, Homo sapiens
  Table A; Target 92137; HLA-B*35:03; TSPAN10; ENSG00000182612; TAA
SPSPGAPPA

SEQ ID NO: 92138 - protein, 9 aa, Homo sapiens
  Table A; Target 92138; HLA-B*54:01; TSPAN10; ENSG00000182612; TAA
SPSPGAPPA

SEQ ID NO: 92139 - protein, 9 aa, Homo sapiens
  Table A; Target 92139; HLA-B*55:01; TSPAN10; ENSG00000182612; TAA
SPSPGAPPA

SEQ ID NO: 92140 - protein, 9 aa, Homo sapiens
  Table A; Target 92140; HLA-B*56:01; TSPAN10; ENSG00000182612; TAA
SPSPGAPPA

SEQ ID NO: 92141 - protein, 10 aa, Homo sapiens
  Table A; Target 92141; HLA-B*07:02; TSPAN10; ENSG00000182612; TAA
SPSPGAPPAA

SEQ ID NO: 92142 - protein, 10 aa, Homo sapiens
  Table A; Target 92142; HLA-B*54:01; TSPAN10; ENSG00000182612; TAA
SPSPGAPPAA

SEQ ID NO: 92143 - protein, 10 aa, Homo sapiens
  Table A; Target 92143; HLA-B*55:01; TSPAN10; ENSG00000182612; TAA
SPSPGAPPAA

SEQ ID NO: 92144 - protein, 10 aa, Homo sapiens
  Table A; Target 92144; HLA-B*56:01; TSPAN10; ENSG00000182612; TAA
SPSPGAPPAA

SEQ ID NO: 92145 - protein, 10 aa, Homo sapiens
  Table A; Target 92145; HLA-B*38:01; TSPAN10; ENSG00000182612; TAA
SQETAGQKPL

SEQ ID NO: 92146 - protein, 10 aa, Homo sapiens
  Table A; Target 92146; HLA-C*01:02; TSPAN10; ENSG00000182612; TAA
SSPGVQACSL

SEQ ID NO: 92147 - protein, 9 aa, Homo sapiens
  Table A; Target 92147; HLA-A*02:04; TSPAN10; ENSG00000182612; TAA
SYQDWQQNL

SEQ ID NO: 92148 - protein, 9 aa, Homo sapiens
  Table A; Target 92148; HLA-A*23:01; TSPAN10; ENSG00000182612; TAA
SYQDWQQNL

SEQ ID NO: 92149 - protein, 9 aa, Homo sapiens
  Table A; Target 92149; HLA-A*24:02; TSPAN10; ENSG00000182612; TAA
SYQDWQQNL

SEQ ID NO: 92150 - protein, 9 aa, Homo sapiens
  Table A; Target 92150; HLA-A*31:01; TSPAN10; ENSG00000182612; TAA
SYQDWQQNL

SEQ ID NO: 92151 - protein, 9 aa, Homo sapiens
  Table A; Target 92151; HLA-C*01:02; TSPAN10; ENSG00000182612; TAA
SYQDWQQNL

SEQ ID NO: 92152 - protein, 9 aa, Homo sapiens
  Table A; Target 92152; HLA-C*14:02; TSPAN10; ENSG00000182612; TAA
SYQDWQQNL

SEQ ID NO: 92153 - protein, 9 aa, Homo sapiens
  Table A; Target 92153; HLA-C*16:02; TSPAN10; ENSG00000182612; TAA
SYQDWQQNL

SEQ ID NO: 92154 - protein, 10 aa, Homo sapiens
  Table A; Target 92154; HLA-A*23:01; TSPAN10; ENSG00000182612; TAA
SYQDWQQNLY

SEQ ID NO: 92155 - protein, 10 aa, Homo sapiens
  Table A; Target 92155; HLA-A*24:02; TSPAN10; ENSG00000182612; TAA
SYQDWQQNLY

SEQ ID NO: 92156 - protein, 10 aa, Homo sapiens
  Table A; Target 92156; HLA-A*29:02; TSPAN10; ENSG00000182612; TAA
SYQDWQQNLY

SEQ ID NO: 92157 - protein, 10 aa, Homo sapiens
  Table A; Target 92157; HLA-A*30:02; TSPAN10; ENSG00000182612; TAA
SYQDWQQNLY

SEQ ID NO: 92158 - protein, 10 aa, Homo sapiens
  Table A; Target 92158; HLA-C*04:01; TSPAN10; ENSG00000182612; TAA
SYQDWQQNLY

SEQ ID NO: 92159 - protein, 10 aa, Homo sapiens
  Table A; Target 92159; HLA-C*07:01; TSPAN10; ENSG00000182612; TAA
SYQDWQQNLY

SEQ ID NO: 92160 - protein, 10 aa, Homo sapiens
  Table A; Target 92160; HLA-C*14:02; TSPAN10; ENSG00000182612; TAA
SYQDWQQNLY

SEQ ID NO: 92161 - protein, 10 aa, Homo sapiens
  Table A; Target 92161; HLA-C*16:02; TSPAN10; ENSG00000182612; TAA
SYQDWQQNLY

SEQ ID NO: 92162 - protein, 11 aa, Homo sapiens
  Table A; Target 92162; HLA-A*24:02; TSPAN10; ENSG00000182612; TAA
SYQDWQQNLYF

SEQ ID NO: 92163 - protein, 11 aa, Homo sapiens
  Table A; Target 92163; HLA-A*29:02; TSPAN10; ENSG00000182612; TAA
SYQDWQQNLYF

SEQ ID NO: 92164 - protein, 9 aa, Homo sapiens
  Table A; Target 92164; HLA-A*02:03; TSPAN10; ENSG00000182612; TAA
TAGQKPLSV

SEQ ID NO: 92165 - protein, 9 aa, Homo sapiens
  Table A; Target 92165; HLA-B*08:01; TSPAN10; ENSG00000182612; TAA
TAGQKPLSV

SEQ ID NO: 92166 - protein, 9 aa, Homo sapiens
  Table A; Target 92166; HLA-B*13:02; TSPAN10; ENSG00000182612; TAA
TAGQKPLSV

SEQ ID NO: 92167 - protein, 9 aa, Homo sapiens
  Table A; Target 92167; HLA-B*35:03; TSPAN10; ENSG00000182612; TAA
TAGQKPLSV

SEQ ID NO: 92168 - protein, 9 aa, Homo sapiens
  Table A; Target 92168; HLA-B*39:01; TSPAN10; ENSG00000182612; TAA
TAGQKPLSV

SEQ ID NO: 92169 - protein, 9 aa, Homo sapiens
  Table A; Target 92169; HLA-B*51:01; TSPAN10; ENSG00000182612; TAA
TAGQKPLSV

SEQ ID NO: 92170 - protein, 9 aa, Homo sapiens
  Table A; Target 92170; HLA-B*54:01; TSPAN10; ENSG00000182612; TAA
TAGQKPLSV

SEQ ID NO: 92171 - protein, 9 aa, Homo sapiens
  Table A; Target 92171; HLA-B*56:01; TSPAN10; ENSG00000182612; TAA
TAGQKPLSV

SEQ ID NO: 92172 - protein, 9 aa, Homo sapiens
  Table A; Target 92172; HLA-C*02:02; TSPAN10; ENSG00000182612; TAA
TAGQKPLSV

SEQ ID NO: 92173 - protein, 9 aa, Homo sapiens
  Table A; Target 92173; HLA-C*03:03; TSPAN10; ENSG00000182612; TAA
TAGQKPLSV

SEQ ID NO: 92174 - protein, 9 aa, Homo sapiens
  Table A; Target 92174; HLA-C*03:04; TSPAN10; ENSG00000182612; TAA
TAGQKPLSV

SEQ ID NO: 92175 - protein, 9 aa, Homo sapiens
  Table A; Target 92175; HLA-C*05:01; TSPAN10; ENSG00000182612; TAA
TAGQKPLSV

SEQ ID NO: 92176 - protein, 9 aa, Homo sapiens
  Table A; Target 92176; HLA-C*07:01; TSPAN10; ENSG00000182612; TAA
TAGQKPLSV

SEQ ID NO: 92177 - protein, 9 aa, Homo sapiens
  Table A; Target 92177; HLA-C*12:03; TSPAN10; ENSG00000182612; TAA
TAGQKPLSV

SEQ ID NO: 92178 - protein, 9 aa, Homo sapiens
  Table A; Target 92178; HLA-C*16:01; TSPAN10; ENSG00000182612; TAA
TAGQKPLSV

SEQ ID NO: 92179 - protein, 9 aa, Homo sapiens
  Table A; Target 92179; HLA-C*16:02; TSPAN10; ENSG00000182612; TAA
TAGQKPLSV

SEQ ID NO: 92180 - protein, 11 aa, Homo sapiens
  Table A; Target 92180; HLA-C*04:01; TSPAN10; ENSG00000182612; TAA
TKHQALSGTPK

SEQ ID NO: 92181 - protein, 9 aa, Homo sapiens
  Table A; Target 92181; HLA-A*03:01; TSPAN10; ENSG00000182612; TAA
TLRVAIAHY

SEQ ID NO: 92182 - protein, 9 aa, Homo sapiens
  Table A; Target 92182; HLA-A*29:02; TSPAN10; ENSG00000182612; TAA
TLRVAIAHY

SEQ ID NO: 92183 - protein, 9 aa, Homo sapiens
  Table A; Target 92183; HLA-A*30:02; TSPAN10; ENSG00000182612; TAA
TLRVAIAHY

SEQ ID NO: 92184 - protein, 9 aa, Homo sapiens
  Table A; Target 92184; HLA-A*32:01; TSPAN10; ENSG00000182612; TAA
TLRVAIAHY

SEQ ID NO: 92185 - protein, 9 aa, Homo sapiens
  Table A; Target 92185; HLA-B*15:01; TSPAN10; ENSG00000182612; TAA
TLRVAIAHY

SEQ ID NO: 92186 - protein, 9 aa, Homo sapiens
  Table A; Target 92186; HLA-B*15:03; TSPAN10; ENSG00000182612; TAA
TLRVAIAHY

SEQ ID NO: 92187 - protein, 9 aa, Homo sapiens
  Table A; Target 92187; HLA-B*46:01; TSPAN10; ENSG00000182612; TAA
TLRVAIAHY

SEQ ID NO: 92188 - protein, 9 aa, Homo sapiens
  Table A; Target 92188; HLA-C*07:04; TSPAN10; ENSG00000182612; TAA
TLRVAIAHY

SEQ ID NO: 92189 - protein, 8 aa, Homo sapiens
  Table A; Target 92189; HLA-B*07:02; TSPAN10; ENSG00000182612; TAA
TPKKGPAP

SEQ ID NO: 92190 - protein, 8 aa, Homo sapiens
  Table A; Target 92190; HLA-B*55:01; TSPAN10; ENSG00000182612; TAA
TPKKGPAP

SEQ ID NO: 92191 - protein, 10 aa, Homo sapiens
  Table A; Target 92191; HLA-B*07:02; TSPAN10; ENSG00000182612; TAA
TPKKGPAPSL

SEQ ID NO: 92192 - protein, 10 aa, Homo sapiens
  Table A; Target 92192; HLA-B*08:01; TSPAN10; ENSG00000182612; TAA
TPKKGPAPSL

SEQ ID NO: 92193 - protein, 10 aa, Homo sapiens
  Table A; Target 92193; HLA-B*35:03; TSPAN10; ENSG00000182612; TAA
TPKKGPAPSL

SEQ ID NO: 92194 - protein, 10 aa, Homo sapiens
  Table A; Target 92194; HLA-B*40:02; TSPAN10; ENSG00000182612; TAA
TPKKGPAPSL

SEQ ID NO: 92195 - protein, 10 aa, Homo sapiens
  Table A; Target 92195; HLA-B*51:01; TSPAN10; ENSG00000182612; TAA
TPKKGPAPSL

SEQ ID NO: 92196 - protein, 10 aa, Homo sapiens
  Table A; Target 92196; HLA-B*55:01; TSPAN10; ENSG00000182612; TAA
TPKKGPAPSL

SEQ ID NO: 92197 - protein, 10 aa, Homo sapiens
  Table A; Target 92197; HLA-B*56:01; TSPAN10; ENSG00000182612; TAA
TPKKGPAPSL

SEQ ID NO: 92198 - protein, 10 aa, Homo sapiens
  Table A; Target 92198; HLA-C*07:02; TSPAN10; ENSG00000182612; TAA
TPKKGPAPSL

SEQ ID NO: 92199 - protein, 8 aa, Homo sapiens
  Table A; Target 92199; HLA-C*12:03; TSPAN10; ENSG00000182612; TAA
VAGALVVA

SEQ ID NO: 92200 - protein, 9 aa, Homo sapiens
  Table A; Target 92200; HLA-A*23:01; TSPAN10; ENSG00000182612; TAA
VAGALVVAL

SEQ ID NO: 92201 - protein, 9 aa, Homo sapiens
  Table A; Target 92201; HLA-A*30:01; TSPAN10; ENSG00000182612; TAA
VAGALVVAL

SEQ ID NO: 92202 - protein, 9 aa, Homo sapiens
  Table A; Target 92202; HLA-A*68:01; TSPAN10; ENSG00000182612; TAA
VAGALVVAL

SEQ ID NO: 92203 - protein, 9 aa, Homo sapiens
  Table A; Target 92203; HLA-B*08:01; TSPAN10; ENSG00000182612; TAA
VAGALVVAL

SEQ ID NO: 92204 - protein, 9 aa, Homo sapiens
  Table A; Target 92204; HLA-B*15:03; TSPAN10; ENSG00000182612; TAA
VAGALVVAL

SEQ ID NO: 92205 - protein, 9 aa, Homo sapiens
  Table A; Target 92205; HLA-B*18:01; TSPAN10; ENSG00000182612; TAA
VAGALVVAL

SEQ ID NO: 92206 - protein, 9 aa, Homo sapiens
  Table A; Target 92206; HLA-B*27:05; TSPAN10; ENSG00000182612; TAA
VAGALVVAL

SEQ ID NO: 92207 - protein, 9 aa, Homo sapiens
  Table A; Target 92207; HLA-B*35:01; TSPAN10; ENSG00000182612; TAA
VAGALVVAL

SEQ ID NO: 92208 - protein, 9 aa, Homo sapiens
  Table A; Target 92208; HLA-B*35:03; TSPAN10; ENSG00000182612; TAA
VAGALVVAL

SEQ ID NO: 92209 - protein, 9 aa, Homo sapiens
  Table A; Target 92209; HLA-B*39:01; TSPAN10; ENSG00000182612; TAA
VAGALVVAL

SEQ ID NO: 92210 - protein, 9 aa, Homo sapiens
  Table A; Target 92210; HLA-B*40:01; TSPAN10; ENSG00000182612; TAA
VAGALVVAL

SEQ ID NO: 92211 - protein, 9 aa, Homo sapiens
  Table A; Target 92211; HLA-B*46:01; TSPAN10; ENSG00000182612; TAA
VAGALVVAL

SEQ ID NO: 92212 - protein, 9 aa, Homo sapiens
  Table A; Target 92212; HLA-C*01:02; TSPAN10; ENSG00000182612; TAA
VAGALVVAL

SEQ ID NO: 92213 - protein, 9 aa, Homo sapiens
  Table A; Target 92213; HLA-C*02:02; TSPAN10; ENSG00000182612; TAA
VAGALVVAL

SEQ ID NO: 92214 - protein, 9 aa, Homo sapiens
  Table A; Target 92214; HLA-C*03:03; TSPAN10; ENSG00000182612; TAA
VAGALVVAL

SEQ ID NO: 92215 - protein, 9 aa, Homo sapiens
  Table A; Target 92215; HLA-C*03:04; TSPAN10; ENSG00000182612; TAA
VAGALVVAL

SEQ ID NO: 92216 - protein, 9 aa, Homo sapiens
  Table A; Target 92216; HLA-C*05:01; TSPAN10; ENSG00000182612; TAA
VAGALVVAL

SEQ ID NO: 92217 - protein, 9 aa, Homo sapiens
  Table A; Target 92217; HLA-C*07:04; TSPAN10; ENSG00000182612; TAA
VAGALVVAL

SEQ ID NO: 92218 - protein, 9 aa, Homo sapiens
  Table A; Target 92218; HLA-C*07:06; TSPAN10; ENSG00000182612; TAA
VAGALVVAL

SEQ ID NO: 92219 - protein, 9 aa, Homo sapiens
  Table A; Target 92219; HLA-C*12:03; TSPAN10; ENSG00000182612; TAA
VAGALVVAL

SEQ ID NO: 92220 - protein, 9 aa, Homo sapiens
  Table A; Target 92220; HLA-C*14:02; TSPAN10; ENSG00000182612; TAA
VAGALVVAL

SEQ ID NO: 92221 - protein, 9 aa, Homo sapiens
  Table A; Target 92221; HLA-C*16:02; TSPAN10; ENSG00000182612; TAA
VAGALVVAL

SEQ ID NO: 92222 - protein, 9 aa, Homo sapiens
  Table A; Target 92222; HLA-C*16:04; TSPAN10; ENSG00000182612; TAA
VAGALVVAL

SEQ ID NO: 92223 - protein, 10 aa, Homo sapiens
  Table A; Target 92223; HLA-B*44:02; TSPAN10; ENSG00000182612; TAA
VAGALVVALW

SEQ ID NO: 92224 - protein, 10 aa, Homo sapiens
  Table A; Target 92224; HLA-B*57:01; TSPAN10; ENSG00000182612; TAA
VAGALVVALW

SEQ ID NO: 92225 - protein, 9 aa, Homo sapiens
  Table A; Target 92225; HLA-B*15:03; TSPAN10; ENSG00000182612; TAA
VKGSLGSDL

SEQ ID NO: 92226 - protein, 9 aa, Homo sapiens
  Table A; Target 92226; HLA-A*02:07; TSPAN10; ENSG00000182612; TAA
VLEAVAGAL

SEQ ID NO: 92227 - protein, 9 aa, Homo sapiens
  Table A; Target 92227; HLA-B*39:01; TSPAN10; ENSG00000182612; TAA
VLEAVAGAL

SEQ ID NO: 92228 - protein, 9 aa, Homo sapiens
  Table A; Target 92228; HLA-B*40:01; TSPAN10; ENSG00000182612; TAA
VLEAVAGAL

SEQ ID NO: 92229 - protein, 9 aa, Homo sapiens
  Table A; Target 92229; HLA-C*01:02; TSPAN10; ENSG00000182612; TAA
VLEAVAGAL

SEQ ID NO: 92230 - protein, 9 aa, Homo sapiens
  Table A; Target 92230; HLA-C*05:01; TSPAN10; ENSG00000182612; TAA
VLEAVAGAL

SEQ ID NO: 92231 - protein, 9 aa, Homo sapiens
  Table A; Target 92231; HLA-C*07:02; TSPAN10; ENSG00000182612; TAA
VLEAVAGAL

SEQ ID NO: 92232 - protein, 10 aa, Homo sapiens
  Table A; Target 92232; HLA-A*01:01; TSPAN10; ENSG00000182612; TAA
VLEAVAGALV

SEQ ID NO: 92233 - protein, 10 aa, Homo sapiens
  Table A; Target 92233; HLA-A*02:07; TSPAN10; ENSG00000182612; TAA
VLEAVAGALV

SEQ ID NO: 92234 - protein, 11 aa, Homo sapiens
  Table A; Target 92234; HLA-A*01:01; TSPAN10; ENSG00000182612; TAA
VLEAVAGALVV

SEQ ID NO: 92235 - protein, 11 aa, Homo sapiens
  Table A; Target 92235; HLA-A*02:01; TSPAN10; ENSG00000182612; TAA
VLEAVAGALVV

SEQ ID NO: 92236 - protein, 11 aa, Homo sapiens
  Table A; Target 92236; HLA-A*02:07; TSPAN10; ENSG00000182612; TAA
VLEAVAGALVV

SEQ ID NO: 92237 - protein, 11 aa, Homo sapiens
  Table A; Target 92237; HLA-C*06:02; TSPAN10; ENSG00000182612; TAA
VLEAVAGALVV

SEQ ID NO: 92238 - protein, 11 aa, Homo sapiens
  Table A; Target 92238; HLA-C*07:01; TSPAN10; ENSG00000182612; TAA
VLEAVAGALVV

SEQ ID NO: 92239 - protein, 8 aa, Homo sapiens
  Table A; Target 92239; HLA-C*01:02; TSPAN10; ENSG00000182612; TAA
VLLQGAEL

SEQ ID NO: 92240 - protein, 8 aa, Homo sapiens
  Table A; Target 92240; HLA-C*03:03; TSPAN10; ENSG00000182612; TAA
VLLQGAEL

SEQ ID NO: 92241 - protein, 8 aa, Homo sapiens
  Table A; Target 92241; HLA-C*03:04; TSPAN10; ENSG00000182612; TAA
VLLQGAEL

SEQ ID NO: 92242 - protein, 8 aa, Homo sapiens
  Table A; Target 92242; HLA-C*14:02; TSPAN10; ENSG00000182612; TAA
VLLQGAEL

SEQ ID NO: 92243 - protein, 9 aa, Homo sapiens
  Table A; Target 92243; HLA-A*02:01; TSPAN10; ENSG00000182612; TAA
VLLQGAELL

SEQ ID NO: 92244 - protein, 9 aa, Homo sapiens
  Table A; Target 92244; HLA-A*02:04; TSPAN10; ENSG00000182612; TAA
VLLQGAELL

SEQ ID NO: 92245 - protein, 9 aa, Homo sapiens
  Table A; Target 92245; HLA-A*23:01; TSPAN10; ENSG00000182612; TAA
VLLQGAELL

SEQ ID NO: 92246 - protein, 9 aa, Homo sapiens
  Table A; Target 92246; HLA-A*24:02; TSPAN10; ENSG00000182612; TAA
VLLQGAELL

SEQ ID NO: 92247 - protein, 10 aa, Homo sapiens
  Table A; Target 92247; HLA-A*02:01; TSPAN10; ENSG00000182612; TAA
VLLQGAELLL

SEQ ID NO: 92248 - protein, 10 aa, Homo sapiens
  Table A; Target 92248; HLA-A*02:04; TSPAN10; ENSG00000182612; TAA
VLLQGAELLL

SEQ ID NO: 92249 - protein, 10 aa, Homo sapiens
  Table A; Target 92249; HLA-A*23:01; TSPAN10; ENSG00000182612; TAA
VLLQGAELLL

SEQ ID NO: 92250 - protein, 11 aa, Homo sapiens
  Table A; Target 92250; HLA-A*02:01; TSPAN10; ENSG00000182612; TAA
VLLQGAELLLA

SEQ ID NO: 92251 - protein, 11 aa, Homo sapiens
  Table A; Target 92251; HLA-A*02:04; TSPAN10; ENSG00000182612; TAA
VLLQGAELLLA

SEQ ID NO: 92252 - protein, 9 aa, Homo sapiens
  Table A; Target 92252; HLA-B*07:02; TSPAN10; ENSG00000182612; TAA
VPREDQAEA

SEQ ID NO: 92253 - protein, 9 aa, Homo sapiens
  Table A; Target 92253; HLA-B*54:01; TSPAN10; ENSG00000182612; TAA
VPREDQAEA

SEQ ID NO: 92254 - protein, 9 aa, Homo sapiens
  Table A; Target 92254; HLA-B*55:01; TSPAN10; ENSG00000182612; TAA
VPREDQAEA

SEQ ID NO: 92255 - protein, 9 aa, Homo sapiens
  Table A; Target 92255; HLA-B*56:01; TSPAN10; ENSG00000182612; TAA
VPREDQAEA

SEQ ID NO: 92256 - protein, 10 aa, Homo sapiens
  Table A; Target 92256; HLA-B*07:02; TSPAN10; ENSG00000182612; TAA
VPREDQAEAW

SEQ ID NO: 92257 - protein, 10 aa, Homo sapiens
  Table A; Target 92257; HLA-B*57:01; TSPAN10; ENSG00000182612; TAA
VPREDQAEAW

SEQ ID NO: 92258 - protein, 10 aa, Homo sapiens
  Table A; Target 92258; HLA-C*07:02; TSPAN10; ENSG00000182612; TAA
VPREDQAEAW

SEQ ID NO: 92259 - protein, 10 aa, Homo sapiens
  Table A; Target 92259; HLA-C*07:02; TSPAN10; ENSG00000182612; TAA
VSAASLAGCL

SEQ ID NO: 92260 - protein, 9 aa, Homo sapiens
  Table A; Target 92260; HLA-A*23:01; TSPAN10; ENSG00000182612; TAA
VVLLQGAEL

SEQ ID NO: 92261 - protein, 9 aa, Homo sapiens
  Table A; Target 92261; HLA-B*07:02; TSPAN10; ENSG00000182612; TAA
VVLLQGAEL

SEQ ID NO: 92262 - protein, 9 aa, Homo sapiens
  Table A; Target 92262; HLA-B*46:01; TSPAN10; ENSG00000182612; TAA
VVLLQGAEL

SEQ ID NO: 92263 - protein, 9 aa, Homo sapiens
  Table A; Target 92263; HLA-C*01:02; TSPAN10; ENSG00000182612; TAA
VVLLQGAEL

SEQ ID NO: 92264 - protein, 9 aa, Homo sapiens
  Table A; Target 92264; HLA-C*03:03; TSPAN10; ENSG00000182612; TAA
VVLLQGAEL

SEQ ID NO: 92265 - protein, 9 aa, Homo sapiens
  Table A; Target 92265; HLA-C*03:04; TSPAN10; ENSG00000182612; TAA
VVLLQGAEL

SEQ ID NO: 92266 - protein, 9 aa, Homo sapiens
  Table A; Target 92266; HLA-C*14:02; TSPAN10; ENSG00000182612; TAA
VVLLQGAEL

SEQ ID NO: 92267 - protein, 11 aa, Homo sapiens
  Table A; Target 92267; HLA-A*23:01; TSPAN10; ENSG00000182612; TAA
VVLLQGAELLL

SEQ ID NO: 92268 - protein, 9 aa, Homo sapiens
  Table A; Target 92268; HLA-C*01:02; TSPAN10; ENSG00000182612; TAA
VVSAASLAG

SEQ ID NO: 92269 - protein, 10 aa, Homo sapiens
  Table A; Target 92269; HLA-A*23:01; TSPAN10; ENSG00000182612; TAA
VYLEGCGPPL

SEQ ID NO: 92270 - protein, 10 aa, Homo sapiens
  Table A; Target 92270; HLA-A*24:02; TSPAN10; ENSG00000182612; TAA
VYLEGCGPPL

SEQ ID NO: 92271 - protein, 10 aa, Homo sapiens
  Table A; Target 92271; HLA-C*14:02; TSPAN10; ENSG00000182612; TAA
VYLEGCGPPL

SEQ ID NO: 92272 - protein, 8 aa, Homo sapiens
  Table A; Target 92272; HLA-A*23:01; TSPAN10; ENSG00000182612; TAA
YAIAVVLL

SEQ ID NO: 92273 - protein, 8 aa, Homo sapiens
  Table A; Target 92273; HLA-B*08:01; TSPAN10; ENSG00000182612; TAA
YAIAVVLL

SEQ ID NO: 92274 - protein, 8 aa, Homo sapiens
  Table A; Target 92274; HLA-B*35:03; TSPAN10; ENSG00000182612; TAA
YAIAVVLL

SEQ ID NO: 92275 - protein, 8 aa, Homo sapiens
  Table A; Target 92275; HLA-B*51:01; TSPAN10; ENSG00000182612; TAA
YAIAVVLL

SEQ ID NO: 92276 - protein, 8 aa, Homo sapiens
  Table A; Target 92276; HLA-C*02:02; TSPAN10; ENSG00000182612; TAA
YAIAVVLL

SEQ ID NO: 92277 - protein, 8 aa, Homo sapiens
  Table A; Target 92277; HLA-C*03:03; TSPAN10; ENSG00000182612; TAA
YAIAVVLL

SEQ ID NO: 92278 - protein, 8 aa, Homo sapiens
  Table A; Target 92278; HLA-C*03:04; TSPAN10; ENSG00000182612; TAA
YAIAVVLL

SEQ ID NO: 92279 - protein, 8 aa, Homo sapiens
  Table A; Target 92279; HLA-C*05:01; TSPAN10; ENSG00000182612; TAA
YAIAVVLL

SEQ ID NO: 92280 - protein, 8 aa, Homo sapiens
  Table A; Target 92280; HLA-C*12:03; TSPAN10; ENSG00000182612; TAA
YAIAVVLL

SEQ ID NO: 92281 - protein, 11 aa, Homo sapiens
  Table A; Target 92281; HLA-B*54:01; TSPAN10; ENSG00000182612; TAA
YAIAVVLLQGA

SEQ ID NO: 92282 - protein, 9 aa, Homo sapiens
  Table A; Target 92282; HLA-C*14:02; TSPAN10; ENSG00000182612; TAA
YFNCSSPGV

SEQ ID NO: 92283 - protein, 8 aa, Homo sapiens
  Table A; Target 92283; HLA-C*05:01; TSPAN10; ENSG00000182612; TAA
YQDDPDLR

SEQ ID NO: 92284 - protein, 9 aa, Homo sapiens
  Table A; Target 92284; HLA-A*01:01; TSPAN10; ENSG00000182612; TAA
YQDDPDLRF

SEQ ID NO: 92285 - protein, 9 aa, Homo sapiens
  Table A; Target 92285; HLA-A*02:01; TSPAN10; ENSG00000182612; TAA
YQDDPDLRF

SEQ ID NO: 92286 - protein, 9 aa, Homo sapiens
  Table A; Target 92286; HLA-A*02:04; TSPAN10; ENSG00000182612; TAA
YQDDPDLRF

SEQ ID NO: 92287 - protein, 9 aa, Homo sapiens
  Table A; Target 92287; HLA-A*02:07; TSPAN10; ENSG00000182612; TAA
YQDDPDLRF

SEQ ID NO: 92288 - protein, 9 aa, Homo sapiens
  Table A; Target 92288; HLA-A*23:01; TSPAN10; ENSG00000182612; TAA
YQDDPDLRF

SEQ ID NO: 92289 - protein, 9 aa, Homo sapiens
  Table A; Target 92289; HLA-A*24:02; TSPAN10; ENSG00000182612; TAA
YQDDPDLRF

SEQ ID NO: 92290 - protein, 9 aa, Homo sapiens
  Table A; Target 92290; HLA-A*26:01; TSPAN10; ENSG00000182612; TAA
YQDDPDLRF

SEQ ID NO: 92291 - protein, 9 aa, Homo sapiens
  Table A; Target 92291; HLA-B*13:02; TSPAN10; ENSG00000182612; TAA
YQDDPDLRF

SEQ ID NO: 92292 - protein, 9 aa, Homo sapiens
  Table A; Target 92292; HLA-B*15:01; TSPAN10; ENSG00000182612; TAA
YQDDPDLRF

SEQ ID NO: 92293 - protein, 9 aa, Homo sapiens
  Table A; Target 92293; HLA-B*27:05; TSPAN10; ENSG00000182612; TAA
YQDDPDLRF

SEQ ID NO: 92294 - protein, 9 aa, Homo sapiens
  Table A; Target 92294; HLA-B*35:03; TSPAN10; ENSG00000182612; TAA
YQDDPDLRF

SEQ ID NO: 92295 - protein, 9 aa, Homo sapiens
  Table A; Target 92295; HLA-B*38:01; TSPAN10; ENSG00000182612; TAA
YQDDPDLRF

SEQ ID NO: 92296 - protein, 9 aa, Homo sapiens
  Table A; Target 92296; HLA-B*39:01; TSPAN10; ENSG00000182612; TAA
YQDDPDLRF

SEQ ID NO: 92297 - protein, 9 aa, Homo sapiens
  Table A; Target 92297; HLA-B*55:01; TSPAN10; ENSG00000182612; TAA
YQDDPDLRF

SEQ ID NO: 92298 - protein, 9 aa, Homo sapiens
  Table A; Target 92298; HLA-B*58:01; TSPAN10; ENSG00000182612; TAA
YQDDPDLRF

SEQ ID NO: 92299 - protein, 9 aa, Homo sapiens
  Table A; Target 92299; HLA-C*02:02; TSPAN10; ENSG00000182612; TAA
YQDDPDLRF

SEQ ID NO: 92300 - protein, 9 aa, Homo sapiens
  Table A; Target 92300; HLA-C*03:03; TSPAN10; ENSG00000182612; TAA
YQDDPDLRF

SEQ ID NO: 92301 - protein, 9 aa, Homo sapiens
  Table A; Target 92301; HLA-C*03:04; TSPAN10; ENSG00000182612; TAA
YQDDPDLRF

SEQ ID NO: 92302 - protein, 9 aa, Homo sapiens
  Table A; Target 92302; HLA-C*04:01; TSPAN10; ENSG00000182612; TAA
YQDDPDLRF

SEQ ID NO: 92303 - protein, 9 aa, Homo sapiens
  Table A; Target 92303; HLA-C*05:01; TSPAN10; ENSG00000182612; TAA
YQDDPDLRF

SEQ ID NO: 92304 - protein, 9 aa, Homo sapiens
  Table A; Target 92304; HLA-C*07:04; TSPAN10; ENSG00000182612; TAA
YQDDPDLRF

SEQ ID NO: 92305 - protein, 10 aa, Homo sapiens
  Table A; Target 92305; HLA-A*02:01; TSPAN10; ENSG00000182612; TAA
YQDDPDLRFL

SEQ ID NO: 92306 - protein, 10 aa, Homo sapiens
  Table A; Target 92306; HLA-A*02:03; TSPAN10; ENSG00000182612; TAA
YQDDPDLRFL

SEQ ID NO: 92307 - protein, 10 aa, Homo sapiens
  Table A; Target 92307; HLA-A*02:04; TSPAN10; ENSG00000182612; TAA
YQDDPDLRFL

SEQ ID NO: 92308 - protein, 10 aa, Homo sapiens
  Table A; Target 92308; HLA-A*02:07; TSPAN10; ENSG00000182612; TAA
YQDDPDLRFL

SEQ ID NO: 92309 - protein, 10 aa, Homo sapiens
  Table A; Target 92309; HLA-B*27:05; TSPAN10; ENSG00000182612; TAA
YQDDPDLRFL

SEQ ID NO: 92310 - protein, 10 aa, Homo sapiens
  Table A; Target 92310; HLA-B*38:01; TSPAN10; ENSG00000182612; TAA
YQDDPDLRFL

SEQ ID NO: 92311 - protein, 10 aa, Homo sapiens
  Table A; Target 92311; HLA-C*05:01; TSPAN10; ENSG00000182612; TAA
YQDDPDLRFL

SEQ ID NO: 92312 - protein, 11 aa, Homo sapiens
  Table A; Target 92312; HLA-A*02:01; TSPAN10; ENSG00000182612; TAA
YQDDPDLRFLL

SEQ ID NO: 92313 - protein, 11 aa, Homo sapiens
  Table A; Target 92313; HLA-A*02:04; TSPAN10; ENSG00000182612; TAA
YQDDPDLRFLL

SEQ ID NO: 92314 - protein, 11 aa, Homo sapiens
  Table A; Target 92314; HLA-A*02:07; TSPAN10; ENSG00000182612; TAA
YQDDPDLRFLL

SEQ ID NO: 92315 - protein, 11 aa, Homo sapiens
  Table A; Target 92315; HLA-A*30:01; TSPAN10; ENSG00000182612; TAA
YQDDPDLRFLL

SEQ ID NO: 92316 - protein, 11 aa, Homo sapiens
  Table A; Target 92316; HLA-B*38:01; TSPAN10; ENSG00000182612; TAA
YQDDPDLRFLL

SEQ ID NO: 92317 - protein, 8 aa, Homo sapiens
  Table A; Target 92317; HLA-B*13:02; TSPAN10; ENSG00000182612; TAA
YQDWQQNL

SEQ ID NO: 92318 - protein, 8 aa, Homo sapiens
  Table A; Target 92318; HLA-B*38:01; TSPAN10; ENSG00000182612; TAA
YQDWQQNL

SEQ ID NO: 92319 - protein, 8 aa, Homo sapiens
  Table A; Target 92319; HLA-B*39:01; TSPAN10; ENSG00000182612; TAA
YQDWQQNL

SEQ ID NO: 92320 - protein, 8 aa, Homo sapiens
  Table A; Target 92320; HLA-C*05:01; TSPAN10; ENSG00000182612; TAA
YQDWQQNL

SEQ ID NO: 92321 - protein, 9 aa, Homo sapiens
  Table A; Target 92321; HLA-A*01:01; TSPAN10; ENSG00000182612; TAA
YQDWQQNLY

SEQ ID NO: 92322 - protein, 9 aa, Homo sapiens
  Table A; Target 92322; HLA-A*29:02; TSPAN10; ENSG00000182612; TAA
YQDWQQNLY

SEQ ID NO: 92323 - protein, 9 aa, Homo sapiens
  Table A; Target 92323; HLA-B*15:01; TSPAN10; ENSG00000182612; TAA
YQDWQQNLY

SEQ ID NO: 92324 - protein, 9 aa, Homo sapiens
  Table A; Target 92324; HLA-B*15:03; TSPAN10; ENSG00000182612; TAA
YQDWQQNLY

SEQ ID NO: 92325 - protein, 9 aa, Homo sapiens
  Table A; Target 92325; HLA-B*38:01; TSPAN10; ENSG00000182612; TAA
YQDWQQNLY

SEQ ID NO: 92326 - protein, 9 aa, Homo sapiens
  Table A; Target 92326; HLA-B*39:01; TSPAN10; ENSG00000182612; TAA
YQDWQQNLY

SEQ ID NO: 92327 - protein, 9 aa, Homo sapiens
  Table A; Target 92327; HLA-C*05:01; TSPAN10; ENSG00000182612; TAA
YQDWQQNLY

SEQ ID NO: 92328 - protein, 9 aa, Homo sapiens
  Table A; Target 92328; HLA-C*07:04; TSPAN10; ENSG00000182612; TAA
YQDWQQNLY

SEQ ID NO: 92329 - protein, 10 aa, Homo sapiens
  Table A; Target 92329; HLA-A*02:07; TSPAN10; ENSG00000182612; TAA
YQDWQQNLYF

SEQ ID NO: 92330 - protein, 10 aa, Homo sapiens
  Table A; Target 92330; HLA-B*38:01; TSPAN10; ENSG00000182612; TAA
YQDWQQNLYF

SEQ ID NO: 92331 - protein, 8 aa, Homo sapiens
  Table A; Target 92331; HLA-B*40:02; TUBA3C; ENSG00000198033; TAA
AAIATIKT

SEQ ID NO: 92332 - protein, 8 aa, Homo sapiens
  Table A; Target 92332; HLA-B*58:01; TUBA3C; ENSG00000198033; TAA
AAIATIKT

SEQ ID NO: 92333 - protein, 8 aa, Homo sapiens
  Table A; Target 92333; HLA-C*06:02; TUBA3C; ENSG00000198033; TAA
AAIATIKT

SEQ ID NO: 92334 - protein, 8 aa, Homo sapiens
  Table A; Target 92334; HLA-C*12:03; TUBA3C; ENSG00000198033; TAA
AAIATIKT

SEQ ID NO: 92335 - protein, 8 aa, Homo sapiens
  Table A; Target 92335; HLA-C*16:02; TUBA3C; ENSG00000198033; TAA
AAIATIKT

SEQ ID NO: 92336 - protein, 9 aa, Homo sapiens
  Table A; Target 92336; HLA-A*02:03; TUBA3C; ENSG00000198033; TAA
AAIATIKTK

SEQ ID NO: 92337 - protein, 9 aa, Homo sapiens
  Table A; Target 92337; HLA-A*03:01; TUBA3C; ENSG00000198033; TAA
AAIATIKTK

SEQ ID NO: 92338 - protein, 9 aa, Homo sapiens
  Table A; Target 92338; HLA-A*03:02; TUBA3C; ENSG00000198033; TAA
AAIATIKTK

SEQ ID NO: 92339 - protein, 9 aa, Homo sapiens
  Table A; Target 92339; HLA-A*11:01; TUBA3C; ENSG00000198033; TAA
AAIATIKTK

SEQ ID NO: 92340 - protein, 9 aa, Homo sapiens
  Table A; Target 92340; HLA-A*25:01; TUBA3C; ENSG00000198033; TAA
AAIATIKTK

SEQ ID NO: 92341 - protein, 9 aa, Homo sapiens
  Table A; Target 92341; HLA-A*31:01; TUBA3C; ENSG00000198033; TAA
AAIATIKTK

SEQ ID NO: 92342 - protein, 9 aa, Homo sapiens
  Table A; Target 92342; HLA-A*32:01; TUBA3C; ENSG00000198033; TAA
AAIATIKTK

SEQ ID NO: 92343 - protein, 9 aa, Homo sapiens
  Table A; Target 92343; HLA-A*33:03; TUBA3C; ENSG00000198033; TAA
AAIATIKTK

SEQ ID NO: 92344 - protein, 9 aa, Homo sapiens
  Table A; Target 92344; HLA-A*68:01; TUBA3C; ENSG00000198033; TAA
AAIATIKTK

SEQ ID NO: 92345 - protein, 9 aa, Homo sapiens
  Table A; Target 92345; HLA-B*13:02; TUBA3C; ENSG00000198033; TAA
AAIATIKTK

SEQ ID NO: 92346 - protein, 9 aa, Homo sapiens
  Table A; Target 92346; HLA-B*15:03; TUBA3C; ENSG00000198033; TAA
AAIATIKTK

SEQ ID NO: 92347 - protein, 9 aa, Homo sapiens
  Table A; Target 92347; HLA-B*27:02; TUBA3C; ENSG00000198033; TAA
AAIATIKTK

SEQ ID NO: 92348 - protein, 9 aa, Homo sapiens
  Table A; Target 92348; HLA-B*27:05; TUBA3C; ENSG00000198033; TAA
AAIATIKTK

SEQ ID NO: 92349 - protein, 9 aa, Homo sapiens
  Table A; Target 92349; HLA-B*40:02; TUBA3C; ENSG00000198033; TAA
AAIATIKTK

SEQ ID NO: 92350 - protein, 9 aa, Homo sapiens
  Table A; Target 92350; HLA-B*44:03; TUBA3C; ENSG00000198033; TAA
AAIATIKTK

SEQ ID NO: 92351 - protein, 9 aa, Homo sapiens
  Table A; Target 92351; HLA-B*46:01; TUBA3C; ENSG00000198033; TAA
AAIATIKTK

SEQ ID NO: 92352 - protein, 9 aa, Homo sapiens
  Table A; Target 92352; HLA-B*54:01; TUBA3C; ENSG00000198033; TAA
AAIATIKTK

SEQ ID NO: 92353 - protein, 9 aa, Homo sapiens
  Table A; Target 92353; HLA-B*57:01; TUBA3C; ENSG00000198033; TAA
AAIATIKTK

SEQ ID NO: 92354 - protein, 9 aa, Homo sapiens
  Table A; Target 92354; HLA-B*58:01; TUBA3C; ENSG00000198033; TAA
AAIATIKTK

SEQ ID NO: 92355 - protein, 9 aa, Homo sapiens
  Table A; Target 92355; HLA-C*01:02; TUBA3C; ENSG00000198033; TAA
AAIATIKTK

SEQ ID NO: 92356 - protein, 9 aa, Homo sapiens
  Table A; Target 92356; HLA-C*02:02; TUBA3C; ENSG00000198033; TAA
AAIATIKTK

SEQ ID NO: 92357 - protein, 9 aa, Homo sapiens
  Table A; Target 92357; HLA-C*03:03; TUBA3C; ENSG00000198033; TAA
AAIATIKTK

SEQ ID NO: 92358 - protein, 9 aa, Homo sapiens
  Table A; Target 92358; HLA-C*03:04; TUBA3C; ENSG00000198033; TAA
AAIATIKTK

SEQ ID NO: 92359 - protein, 9 aa, Homo sapiens
  Table A; Target 92359; HLA-C*04:01; TUBA3C; ENSG00000198033; TAA
AAIATIKTK

SEQ ID NO: 92360 - protein, 9 aa, Homo sapiens
  Table A; Target 92360; HLA-C*06:02; TUBA3C; ENSG00000198033; TAA
AAIATIKTK

SEQ ID NO: 92361 - protein, 9 aa, Homo sapiens
  Table A; Target 92361; HLA-C*07:01; TUBA3C; ENSG00000198033; TAA
AAIATIKTK

SEQ ID NO: 92362 - protein, 9 aa, Homo sapiens
  Table A; Target 92362; HLA-C*07:06; TUBA3C; ENSG00000198033; TAA
AAIATIKTK

SEQ ID NO: 92363 - protein, 9 aa, Homo sapiens
  Table A; Target 92363; HLA-C*12:03; TUBA3C; ENSG00000198033; TAA
AAIATIKTK

SEQ ID NO: 92364 - protein, 9 aa, Homo sapiens
  Table A; Target 92364; HLA-C*16:01; TUBA3C; ENSG00000198033; TAA
AAIATIKTK

SEQ ID NO: 92365 - protein, 9 aa, Homo sapiens
  Table A; Target 92365; HLA-C*16:02; TUBA3C; ENSG00000198033; TAA
AAIATIKTK

SEQ ID NO: 92366 - protein, 9 aa, Homo sapiens
  Table A; Target 92366; HLA-C*16:04; TUBA3C; ENSG00000198033; TAA
AAIATIKTK

SEQ ID NO: 92367 - protein, 10 aa, Homo sapiens
  Table A; Target 92367; HLA-A*11:01; TUBA3C; ENSG00000198033; TAA
AAIATIKTKR

SEQ ID NO: 92368 - protein, 10 aa, Homo sapiens
  Table A; Target 92368; HLA-A*26:01; TUBA3C; ENSG00000198033; TAA
AAIATIKTKR

SEQ ID NO: 92369 - protein, 10 aa, Homo sapiens
  Table A; Target 92369; HLA-A*31:01; TUBA3C; ENSG00000198033; TAA
AAIATIKTKR

SEQ ID NO: 92370 - protein, 10 aa, Homo sapiens
  Table A; Target 92370; HLA-A*33:01; TUBA3C; ENSG00000198033; TAA
AAIATIKTKR

SEQ ID NO: 92371 - protein, 10 aa, Homo sapiens
  Table A; Target 92371; HLA-A*33:03; TUBA3C; ENSG00000198033; TAA
AAIATIKTKR

SEQ ID NO: 92372 - protein, 10 aa, Homo sapiens
  Table A; Target 92372; HLA-A*68:01; TUBA3C; ENSG00000198033; TAA
AAIATIKTKR

SEQ ID NO: 92373 - protein, 10 aa, Homo sapiens
  Table A; Target 92373; HLA-B*57:01; TUBA3C; ENSG00000198033; TAA
AAIATIKTKR

SEQ ID NO: 92374 - protein, 10 aa, Homo sapiens
  Table A; Target 92374; HLA-C*07:06; TUBA3C; ENSG00000198033; TAA
AAIATIKTKR

SEQ ID NO: 92375 - protein, 10 aa, Homo sapiens
  Table A; Target 92375; HLA-A*02:01; TUBA3C; ENSG00000198033; TAA
AALEKDYEEV

SEQ ID NO: 92376 - protein, 10 aa, Homo sapiens
  Table A; Target 92376; HLA-B*40:02; TUBA3C; ENSG00000198033; TAA
AALEKDYEEV

SEQ ID NO: 92377 - protein, 10 aa, Homo sapiens
  Table A; Target 92377; HLA-C*16:04; TUBA3C; ENSG00000198033; TAA
AALEKDYEEV

SEQ ID NO: 92378 - protein, 9 aa, Homo sapiens
  Table A; Target 92378; HLA-C*16:01; TUBA3C; ENSG00000198033; TAA
AANNYARGH

SEQ ID NO: 92379 - protein, 9 aa, Homo sapiens
  Table A; Target 92379; HLA-C*16:02; TUBA3C; ENSG00000198033; TAA
AANNYARGH

SEQ ID NO: 92380 - protein, 10 aa, Homo sapiens
  Table A; Target 92380; HLA-A*30:02; TUBA3C; ENSG00000198033; TAA
AANNYARGHY

SEQ ID NO: 92381 - protein, 10 aa, Homo sapiens
  Table A; Target 92381; HLA-A*32:01; TUBA3C; ENSG00000198033; TAA
AANNYARGHY

SEQ ID NO: 92382 - protein, 10 aa, Homo sapiens
  Table A; Target 92382; HLA-B*15:01; TUBA3C; ENSG00000198033; TAA
AANNYARGHY

SEQ ID NO: 92383 - protein, 10 aa, Homo sapiens
  Table A; Target 92383; HLA-B*15:03; TUBA3C; ENSG00000198033; TAA
AANNYARGHY

SEQ ID NO: 92384 - protein, 10 aa, Homo sapiens
  Table A; Target 92384; HLA-C*16:01; TUBA3C; ENSG00000198033; TAA
AANNYARGHY

SEQ ID NO: 92385 - protein, 10 aa, Homo sapiens
  Table A; Target 92385; HLA-C*16:02; TUBA3C; ENSG00000198033; TAA
AANNYARGHY

SEQ ID NO: 92386 - protein, 10 aa, Homo sapiens
  Table A; Target 92386; HLA-C*16:04; TUBA3C; ENSG00000198033; TAA
AANNYARGHY

SEQ ID NO: 92387 - protein, 9 aa, Homo sapiens
  Table A; Target 92387; HLA-A*11:01; TUBA3C; ENSG00000198033; TAA
ACFEPANQM

SEQ ID NO: 92388 - protein, 9 aa, Homo sapiens
  Table A; Target 92388; HLA-A*30:01; TUBA3C; ENSG00000198033; TAA
ACFEPANQM

SEQ ID NO: 92389 - protein, 9 aa, Homo sapiens
  Table A; Target 92389; HLA-A*31:01; TUBA3C; ENSG00000198033; TAA
ACFEPANQM

SEQ ID NO: 92390 - protein, 9 aa, Homo sapiens
  Table A; Target 92390; HLA-A*32:01; TUBA3C; ENSG00000198033; TAA
ACFEPANQM

SEQ ID NO: 92391 - protein, 9 aa, Homo sapiens
  Table A; Target 92391; HLA-B*07:02; TUBA3C; ENSG00000198033; TAA
ACFEPANQM

SEQ ID NO: 92392 - protein, 9 aa, Homo sapiens
  Table A; Target 92392; HLA-B*15:01; TUBA3C; ENSG00000198033; TAA
ACFEPANQM

SEQ ID NO: 92393 - protein, 9 aa, Homo sapiens
  Table A; Target 92393; HLA-B*15:03; TUBA3C; ENSG00000198033; TAA
ACFEPANQM

SEQ ID NO: 92394 - protein, 9 aa, Homo sapiens
  Table A; Target 92394; HLA-B*27:05; TUBA3C; ENSG00000198033; TAA
ACFEPANQM

SEQ ID NO: 92395 - protein, 9 aa, Homo sapiens
  Table A; Target 92395; HLA-B*35:01; TUBA3C; ENSG00000198033; TAA
ACFEPANQM

SEQ ID NO: 92396 - protein, 9 aa, Homo sapiens
  Table A; Target 92396; HLA-B*35:03; TUBA3C; ENSG00000198033; TAA
ACFEPANQM

SEQ ID NO: 92397 - protein, 9 aa, Homo sapiens
  Table A; Target 92397; HLA-B*37:01; TUBA3C; ENSG00000198033; TAA
ACFEPANQM

SEQ ID NO: 92398 - protein, 9 aa, Homo sapiens
  Table A; Target 92398; HLA-B*39:01; TUBA3C; ENSG00000198033; TAA
ACFEPANQM

SEQ ID NO: 92399 - protein, 9 aa, Homo sapiens
  Table A; Target 92399; HLA-B*40:02; TUBA3C; ENSG00000198033; TAA
ACFEPANQM

SEQ ID NO: 92400 - protein, 9 aa, Homo sapiens
  Table A; Target 92400; HLA-B*46:01; TUBA3C; ENSG00000198033; TAA
ACFEPANQM

SEQ ID NO: 92401 - protein, 9 aa, Homo sapiens
  Table A; Target 92401; HLA-B*55:01; TUBA3C; ENSG00000198033; TAA
ACFEPANQM

SEQ ID NO: 92402 - protein, 9 aa, Homo sapiens
  Table A; Target 92402; HLA-B*58:01; TUBA3C; ENSG00000198033; TAA
ACFEPANQM

SEQ ID NO: 92403 - protein, 9 aa, Homo sapiens
  Table A; Target 92403; HLA-C*01:02; TUBA3C; ENSG00000198033; TAA
ACFEPANQM

SEQ ID NO: 92404 - protein, 9 aa, Homo sapiens
  Table A; Target 92404; HLA-C*02:02; TUBA3C; ENSG00000198033; TAA
ACFEPANQM

SEQ ID NO: 92405 - protein, 9 aa, Homo sapiens
  Table A; Target 92405; HLA-C*03:03; TUBA3C; ENSG00000198033; TAA
ACFEPANQM

SEQ ID NO: 92406 - protein, 9 aa, Homo sapiens
  Table A; Target 92406; HLA-C*03:04; TUBA3C; ENSG00000198033; TAA
ACFEPANQM

SEQ ID NO: 92407 - protein, 9 aa, Homo sapiens
  Table A; Target 92407; HLA-C*04:01; TUBA3C; ENSG00000198033; TAA
ACFEPANQM

SEQ ID NO: 92408 - protein, 9 aa, Homo sapiens
  Table A; Target 92408; HLA-C*05:01; TUBA3C; ENSG00000198033; TAA
ACFEPANQM

SEQ ID NO: 92409 - protein, 9 aa, Homo sapiens
  Table A; Target 92409; HLA-C*06:02; TUBA3C; ENSG00000198033; TAA
ACFEPANQM

SEQ ID NO: 92410 - protein, 9 aa, Homo sapiens
  Table A; Target 92410; HLA-C*07:02; TUBA3C; ENSG00000198033; TAA
ACFEPANQM

SEQ ID NO: 92411 - protein, 9 aa, Homo sapiens
  Table A; Target 92411; HLA-C*07:04; TUBA3C; ENSG00000198033; TAA
ACFEPANQM

SEQ ID NO: 92412 - protein, 9 aa, Homo sapiens
  Table A; Target 92412; HLA-C*07:06; TUBA3C; ENSG00000198033; TAA
ACFEPANQM

SEQ ID NO: 92413 - protein, 9 aa, Homo sapiens
  Table A; Target 92413; HLA-C*12:03; TUBA3C; ENSG00000198033; TAA
ACFEPANQM

SEQ ID NO: 92414 - protein, 9 aa, Homo sapiens
  Table A; Target 92414; HLA-C*14:02; TUBA3C; ENSG00000198033; TAA
ACFEPANQM

SEQ ID NO: 92415 - protein, 9 aa, Homo sapiens
  Table A; Target 92415; HLA-C*16:01; TUBA3C; ENSG00000198033; TAA
ACFEPANQM

SEQ ID NO: 92416 - protein, 9 aa, Homo sapiens
  Table A; Target 92416; HLA-C*16:02; TUBA3C; ENSG00000198033; TAA
ACFEPANQM

SEQ ID NO: 92417 - protein, 9 aa, Homo sapiens
  Table A; Target 92417; HLA-C*16:04; TUBA3C; ENSG00000198033; TAA
ACFEPANQM

SEQ ID NO: 92418 - protein, 10 aa, Homo sapiens
  Table A; Target 92418; HLA-A*02:01; TUBA3C; ENSG00000198033; TAA
ACFEPANQMV

SEQ ID NO: 92419 - protein, 10 aa, Homo sapiens
  Table A; Target 92419; HLA-A*02:03; TUBA3C; ENSG00000198033; TAA
ACFEPANQMV

SEQ ID NO: 92420 - protein, 10 aa, Homo sapiens
  Table A; Target 92420; HLA-A*02:07; TUBA3C; ENSG00000198033; TAA
ACFEPANQMV

SEQ ID NO: 92421 - protein, 10 aa, Homo sapiens
  Table A; Target 92421; HLA-A*30:01; TUBA3C; ENSG00000198033; TAA
ACFEPANQMV

SEQ ID NO: 92422 - protein, 10 aa, Homo sapiens
  Table A; Target 92422; HLA-A*68:02; TUBA3C; ENSG00000198033; TAA
ACFEPANQMV

SEQ ID NO: 92423 - protein, 10 aa, Homo sapiens
  Table A; Target 92423; HLA-B*13:02; TUBA3C; ENSG00000198033; TAA
ACFEPANQMV

SEQ ID NO: 92424 - protein, 10 aa, Homo sapiens
  Table A; Target 92424; HLA-B*27:05; TUBA3C; ENSG00000198033; TAA
ACFEPANQMV

SEQ ID NO: 92425 - protein, 10 aa, Homo sapiens
  Table A; Target 92425; HLA-B*39:01; TUBA3C; ENSG00000198033; TAA
ACFEPANQMV

SEQ ID NO: 92426 - protein, 10 aa, Homo sapiens
  Table A; Target 92426; HLA-B*40:02; TUBA3C; ENSG00000198033; TAA
ACFEPANQMV

SEQ ID NO: 92427 - protein, 10 aa, Homo sapiens
  Table A; Target 92427; HLA-B*55:01; TUBA3C; ENSG00000198033; TAA
ACFEPANQMV

SEQ ID NO: 92428 - protein, 10 aa, Homo sapiens
  Table A; Target 92428; HLA-C*04:01; TUBA3C; ENSG00000198033; TAA
ACFEPANQMV

SEQ ID NO: 92429 - protein, 10 aa, Homo sapiens
  Table A; Target 92429; HLA-C*06:02; TUBA3C; ENSG00000198033; TAA
ACFEPANQMV

SEQ ID NO: 92430 - protein, 10 aa, Homo sapiens
  Table A; Target 92430; HLA-C*12:03; TUBA3C; ENSG00000198033; TAA
ACFEPANQMV

SEQ ID NO: 92431 - protein, 11 aa, Homo sapiens
  Table A; Target 92431; HLA-A*03:01; TUBA3C; ENSG00000198033; TAA
ACFEPANQMVK

SEQ ID NO: 92432 - protein, 11 aa, Homo sapiens
  Table A; Target 92432; HLA-A*03:02; TUBA3C; ENSG00000198033; TAA
ACFEPANQMVK

SEQ ID NO: 92433 - protein, 11 aa, Homo sapiens
  Table A; Target 92433; HLA-A*11:01; TUBA3C; ENSG00000198033; TAA
ACFEPANQMVK

SEQ ID NO: 92434 - protein, 11 aa, Homo sapiens
  Table A; Target 92434; HLA-A*31:01; TUBA3C; ENSG00000198033; TAA
ACFEPANQMVK

SEQ ID NO: 92435 - protein, 11 aa, Homo sapiens
  Table A; Target 92435; HLA-A*68:01; TUBA3C; ENSG00000198033; TAA
ACFEPANQMVK

SEQ ID NO: 92436 - protein, 11 aa, Homo sapiens
  Table A; Target 92436; HLA-B*27:02; TUBA3C; ENSG00000198033; TAA
ACFEPANQMVK

SEQ ID NO: 92437 - protein, 11 aa, Homo sapiens
  Table A; Target 92437; HLA-B*27:05; TUBA3C; ENSG00000198033; TAA
ACFEPANQMVK

SEQ ID NO: 92438 - protein, 11 aa, Homo sapiens
  Table A; Target 92438; HLA-B*57:01; TUBA3C; ENSG00000198033; TAA
ACFEPANQMVK

SEQ ID NO: 92439 - protein, 11 aa, Homo sapiens
  Table A; Target 92439; HLA-C*04:01; TUBA3C; ENSG00000198033; TAA
ACFEPANQMVK

SEQ ID NO: 92440 - protein, 11 aa, Homo sapiens
  Table A; Target 92440; HLA-C*06:02; TUBA3C; ENSG00000198033; TAA
ACFEPANQMVK

SEQ ID NO: 92441 - protein, 11 aa, Homo sapiens
  Table A; Target 92441; HLA-C*07:01; TUBA3C; ENSG00000198033; TAA
ACFEPANQMVK

SEQ ID NO: 92442 - protein, 11 aa, Homo sapiens
  Table A; Target 92442; HLA-C*07:06; TUBA3C; ENSG00000198033; TAA
ACFEPANQMVK

SEQ ID NO: 92443 - protein, 11 aa, Homo sapiens
  Table A; Target 92443; HLA-C*12:03; TUBA3C; ENSG00000198033; TAA
ACFEPANQMVK

SEQ ID NO: 92444 - protein, 11 aa, Homo sapiens
  Table A; Target 92444; HLA-C*16:04; TUBA3C; ENSG00000198033; TAA
ACFEPANQMVK

SEQ ID NO: 92445 - protein, 10 aa, Homo sapiens
  Table A; Target 92445; HLA-B*37:01; TUBA3C; ENSG00000198033; TAA
ADLCTGLQGF

SEQ ID NO: 92446 - protein, 10 aa, Homo sapiens
  Table A; Target 92446; HLA-C*04:01; TUBA3C; ENSG00000198033; TAA
ADLCTGLQGF

SEQ ID NO: 92447 - protein, 10 aa, Homo sapiens
  Table A; Target 92447; HLA-C*07:01; TUBA3C; ENSG00000198033; TAA
ADLCTGLQGF

SEQ ID NO: 92448 - protein, 9 aa, Homo sapiens
  Table A; Target 92448; HLA-A*01:01; TUBA3C; ENSG00000198033; TAA
AEAEEGEEY

SEQ ID NO: 92449 - protein, 9 aa, Homo sapiens
  Table A; Target 92449; HLA-A*25:01; TUBA3C; ENSG00000198033; TAA
AEAEEGEEY

SEQ ID NO: 92450 - protein, 9 aa, Homo sapiens
  Table A; Target 92450; HLA-A*26:01; TUBA3C; ENSG00000198033; TAA
AEAEEGEEY

SEQ ID NO: 92451 - protein, 9 aa, Homo sapiens
  Table A; Target 92451; HLA-A*29:02; TUBA3C; ENSG00000198033; TAA
AEAEEGEEY

SEQ ID NO: 92452 - protein, 9 aa, Homo sapiens
  Table A; Target 92452; HLA-A*30:01; TUBA3C; ENSG00000198033; TAA
AEAEEGEEY

SEQ ID NO: 92453 - protein, 9 aa, Homo sapiens
  Table A; Target 92453; HLA-A*30:02; TUBA3C; ENSG00000198033; TAA
AEAEEGEEY

SEQ ID NO: 92454 - protein, 9 aa, Homo sapiens
  Table A; Target 92454; HLA-A*32:01; TUBA3C; ENSG00000198033; TAA
AEAEEGEEY

SEQ ID NO: 92455 - protein, 9 aa, Homo sapiens
  Table A; Target 92455; HLA-B*15:01; TUBA3C; ENSG00000198033; TAA
AEAEEGEEY

SEQ ID NO: 92456 - protein, 9 aa, Homo sapiens
  Table A; Target 92456; HLA-B*15:03; TUBA3C; ENSG00000198033; TAA
AEAEEGEEY

SEQ ID NO: 92457 - protein, 9 aa, Homo sapiens
  Table A; Target 92457; HLA-B*18:01; TUBA3C; ENSG00000198033; TAA
AEAEEGEEY

SEQ ID NO: 92458 - protein, 9 aa, Homo sapiens
  Table A; Target 92458; HLA-B*27:02; TUBA3C; ENSG00000198033; TAA
AEAEEGEEY

SEQ ID NO: 92459 - protein, 9 aa, Homo sapiens
  Table A; Target 92459; HLA-B*27:05; TUBA3C; ENSG00000198033; TAA
AEAEEGEEY

SEQ ID NO: 92460 - protein, 9 aa, Homo sapiens
  Table A; Target 92460; HLA-B*35:01; TUBA3C; ENSG00000198033; TAA
AEAEEGEEY

SEQ ID NO: 92461 - protein, 9 aa, Homo sapiens
  Table A; Target 92461; HLA-B*37:01; TUBA3C; ENSG00000198033; TAA
AEAEEGEEY

SEQ ID NO: 92462 - protein, 9 aa, Homo sapiens
  Table A; Target 92462; HLA-B*38:01; TUBA3C; ENSG00000198033; TAA
AEAEEGEEY

SEQ ID NO: 92463 - protein, 9 aa, Homo sapiens
  Table A; Target 92463; HLA-B*39:01; TUBA3C; ENSG00000198033; TAA
AEAEEGEEY

SEQ ID NO: 92464 - protein, 9 aa, Homo sapiens
  Table A; Target 92464; HLA-B*40:01; TUBA3C; ENSG00000198033; TAA
AEAEEGEEY

SEQ ID NO: 92465 - protein, 9 aa, Homo sapiens
  Table A; Target 92465; HLA-B*40:02; TUBA3C; ENSG00000198033; TAA
AEAEEGEEY

SEQ ID NO: 92466 - protein, 9 aa, Homo sapiens
  Table A; Target 92466; HLA-B*44:02; TUBA3C; ENSG00000198033; TAA
AEAEEGEEY

SEQ ID NO: 92467 - protein, 9 aa, Homo sapiens
  Table A; Target 92467; HLA-B*44:03; TUBA3C; ENSG00000198033; TAA
AEAEEGEEY

SEQ ID NO: 92468 - protein, 9 aa, Homo sapiens
  Table A; Target 92468; HLA-B*46:01; TUBA3C; ENSG00000198033; TAA
AEAEEGEEY

SEQ ID NO: 92469 - protein, 9 aa, Homo sapiens
  Table A; Target 92469; HLA-B*49:01; TUBA3C; ENSG00000198033; TAA
AEAEEGEEY

SEQ ID NO: 92470 - protein, 9 aa, Homo sapiens
  Table A; Target 92470; HLA-B*55:01; TUBA3C; ENSG00000198033; TAA
AEAEEGEEY

SEQ ID NO: 92471 - protein, 9 aa, Homo sapiens
  Table A; Target 92471; HLA-B*57:01; TUBA3C; ENSG00000198033; TAA
AEAEEGEEY

SEQ ID NO: 92472 - protein, 9 aa, Homo sapiens
  Table A; Target 92472; HLA-B*58:01; TUBA3C; ENSG00000198033; TAA
AEAEEGEEY

SEQ ID NO: 92473 - protein, 9 aa, Homo sapiens
  Table A; Target 92473; HLA-C*01:02; TUBA3C; ENSG00000198033; TAA
AEAEEGEEY

SEQ ID NO: 92474 - protein, 9 aa, Homo sapiens
  Table A; Target 92474; HLA-C*02:02; TUBA3C; ENSG00000198033; TAA
AEAEEGEEY

SEQ ID NO: 92475 - protein, 9 aa, Homo sapiens
  Table A; Target 92475; HLA-C*03:03; TUBA3C; ENSG00000198033; TAA
AEAEEGEEY

SEQ ID NO: 92476 - protein, 9 aa, Homo sapiens
  Table A; Target 92476; HLA-C*03:04; TUBA3C; ENSG00000198033; TAA
AEAEEGEEY

SEQ ID NO: 92477 - protein, 9 aa, Homo sapiens
  Table A; Target 92477; HLA-C*04:01; TUBA3C; ENSG00000198033; TAA
AEAEEGEEY

SEQ ID NO: 92478 - protein, 9 aa, Homo sapiens
  Table A; Target 92478; HLA-C*05:01; TUBA3C; ENSG00000198033; TAA
AEAEEGEEY

SEQ ID NO: 92479 - protein, 9 aa, Homo sapiens
  Table A; Target 92479; HLA-C*07:01; TUBA3C; ENSG00000198033; TAA
AEAEEGEEY

SEQ ID NO: 92480 - protein, 9 aa, Homo sapiens
  Table A; Target 92480; HLA-C*07:04; TUBA3C; ENSG00000198033; TAA
AEAEEGEEY

SEQ ID NO: 92481 - protein, 9 aa, Homo sapiens
  Table A; Target 92481; HLA-C*07:06; TUBA3C; ENSG00000198033; TAA
AEAEEGEEY

SEQ ID NO: 92482 - protein, 9 aa, Homo sapiens
  Table A; Target 92482; HLA-C*12:03; TUBA3C; ENSG00000198033; TAA
AEAEEGEEY

SEQ ID NO: 92483 - protein, 9 aa, Homo sapiens
  Table A; Target 92483; HLA-C*14:02; TUBA3C; ENSG00000198033; TAA
AEAEEGEEY

SEQ ID NO: 92484 - protein, 9 aa, Homo sapiens
  Table A; Target 92484; HLA-C*16:01; TUBA3C; ENSG00000198033; TAA
AEAEEGEEY

SEQ ID NO: 92485 - protein, 9 aa, Homo sapiens
  Table A; Target 92485; HLA-C*16:02; TUBA3C; ENSG00000198033; TAA
AEAEEGEEY

SEQ ID NO: 92486 - protein, 9 aa, Homo sapiens
  Table A; Target 92486; HLA-C*16:04; TUBA3C; ENSG00000198033; TAA
AEAEEGEEY

SEQ ID NO: 92487 - protein, 11 aa, Homo sapiens
  Table A; Target 92487; HLA-B*44:02; TUBA3C; ENSG00000198033; TAA
AEAWARLDHKF

SEQ ID NO: 92488 - protein, 11 aa, Homo sapiens
  Table A; Target 92488; HLA-B*44:03; TUBA3C; ENSG00000198033; TAA
AEAWARLDHKF

SEQ ID NO: 92489 - protein, 8 aa, Homo sapiens
  Table A; Target 92489; HLA-A*23:01; TUBA3C; ENSG00000198033; TAA
AEITNACF

SEQ ID NO: 92490 - protein, 8 aa, Homo sapiens
  Table A; Target 92490; HLA-A*30:01; TUBA3C; ENSG00000198033; TAA
AEITNACF

SEQ ID NO: 92491 - protein, 8 aa, Homo sapiens
  Table A; Target 92491; HLA-B*18:01; TUBA3C; ENSG00000198033; TAA
AEITNACF

SEQ ID NO: 92492 - protein, 8 aa, Homo sapiens
  Table A; Target 92492; HLA-B*27:02; TUBA3C; ENSG00000198033; TAA
AEITNACF

SEQ ID NO: 92493 - protein, 8 aa, Homo sapiens
  Table A; Target 92493; HLA-B*37:01; TUBA3C; ENSG00000198033; TAA
AEITNACF

SEQ ID NO: 92494 - protein, 8 aa, Homo sapiens
  Table A; Target 92494; HLA-B*40:01; TUBA3C; ENSG00000198033; TAA
AEITNACF

SEQ ID NO: 92495 - protein, 8 aa, Homo sapiens
  Table A; Target 92495; HLA-B*40:02; TUBA3C; ENSG00000198033; TAA
AEITNACF

SEQ ID NO: 92496 - protein, 8 aa, Homo sapiens
  Table A; Target 92496; HLA-B*44:02; TUBA3C; ENSG00000198033; TAA
AEITNACF

SEQ ID NO: 92497 - protein, 8 aa, Homo sapiens
  Table A; Target 92497; HLA-B*44:03; TUBA3C; ENSG00000198033; TAA
AEITNACF

SEQ ID NO: 92498 - protein, 8 aa, Homo sapiens
  Table A; Target 92498; HLA-B*49:01; TUBA3C; ENSG00000198033; TAA
AEITNACF

SEQ ID NO: 92499 - protein, 8 aa, Homo sapiens
  Table A; Target 92499; HLA-C*16:04; TUBA3C; ENSG00000198033; TAA
AEITNACF

SEQ ID NO: 92500 - protein, 9 aa, Homo sapiens
  Table A; Target 92500; HLA-A*30:01; TUBA3C; ENSG00000198033; TAA
AEKAYHEQL

SEQ ID NO: 92501 - protein, 9 aa, Homo sapiens
  Table A; Target 92501; HLA-B*07:02; TUBA3C; ENSG00000198033; TAA
AEKAYHEQL

SEQ ID NO: 92502 - protein, 9 aa, Homo sapiens
  Table A; Target 92502; HLA-B*08:01; TUBA3C; ENSG00000198033; TAA
AEKAYHEQL

SEQ ID NO: 92503 - protein, 9 aa, Homo sapiens
  Table A; Target 92503; HLA-B*18:01; TUBA3C; ENSG00000198033; TAA
AEKAYHEQL

SEQ ID NO: 92504 - protein, 9 aa, Homo sapiens
  Table A; Target 92504; HLA-B*27:02; TUBA3C; ENSG00000198033; TAA
AEKAYHEQL

SEQ ID NO: 92505 - protein, 9 aa, Homo sapiens
  Table A; Target 92505; HLA-B*27:05; TUBA3C; ENSG00000198033; TAA
AEKAYHEQL

SEQ ID NO: 92506 - protein, 9 aa, Homo sapiens
  Table A; Target 92506; HLA-B*37:01; TUBA3C; ENSG00000198033; TAA
AEKAYHEQL

SEQ ID NO: 92507 - protein, 9 aa, Homo sapiens
  Table A; Target 92507; HLA-B*40:01; TUBA3C; ENSG00000198033; TAA
AEKAYHEQL

SEQ ID NO: 92508 - protein, 9 aa, Homo sapiens
  Table A; Target 92508; HLA-B*40:02; TUBA3C; ENSG00000198033; TAA
AEKAYHEQL

SEQ ID NO: 92509 - protein, 9 aa, Homo sapiens
  Table A; Target 92509; HLA-B*44:02; TUBA3C; ENSG00000198033; TAA
AEKAYHEQL

SEQ ID NO: 92510 - protein, 9 aa, Homo sapiens
  Table A; Target 92510; HLA-B*44:03; TUBA3C; ENSG00000198033; TAA
AEKAYHEQL

SEQ ID NO: 92511 - protein, 9 aa, Homo sapiens
  Table A; Target 92511; HLA-B*49:01; TUBA3C; ENSG00000198033; TAA
AEKAYHEQL

SEQ ID NO: 92512 - protein, 9 aa, Homo sapiens
  Table A; Target 92512; HLA-C*02:02; TUBA3C; ENSG00000198033; TAA
AEKAYHEQL

SEQ ID NO: 92513 - protein, 9 aa, Homo sapiens
  Table A; Target 92513; HLA-C*04:01; TUBA3C; ENSG00000198033; TAA
AEKAYHEQL

SEQ ID NO: 92514 - protein, 9 aa, Homo sapiens
  Table A; Target 92514; HLA-C*06:02; TUBA3C; ENSG00000198033; TAA
AEKAYHEQL

SEQ ID NO: 92515 - protein, 9 aa, Homo sapiens
  Table A; Target 92515; HLA-C*07:01; TUBA3C; ENSG00000198033; TAA
AEKAYHEQL

SEQ ID NO: 92516 - protein, 9 aa, Homo sapiens
  Table A; Target 92516; HLA-C*07:02; TUBA3C; ENSG00000198033; TAA
AEKAYHEQL

SEQ ID NO: 92517 - protein, 9 aa, Homo sapiens
  Table A; Target 92517; HLA-C*07:04; TUBA3C; ENSG00000198033; TAA
AEKAYHEQL

SEQ ID NO: 92518 - protein, 9 aa, Homo sapiens
  Table A; Target 92518; HLA-C*12:03; TUBA3C; ENSG00000198033; TAA
AEKAYHEQL

SEQ ID NO: 92519 - protein, 9 aa, Homo sapiens
  Table A; Target 92519; HLA-C*16:02; TUBA3C; ENSG00000198033; TAA
AEKAYHEQL

SEQ ID NO: 92520 - protein, 9 aa, Homo sapiens
  Table A; Target 92520; HLA-C*16:04; TUBA3C; ENSG00000198033; TAA
AEKAYHEQL

SEQ ID NO: 92521 - protein, 11 aa, Homo sapiens
  Table A; Target 92521; HLA-A*30:01; TUBA3C; ENSG00000198033; TAA
AEKAYHEQLSV

SEQ ID NO: 92522 - protein, 11 aa, Homo sapiens
  Table A; Target 92522; HLA-B*40:02; TUBA3C; ENSG00000198033; TAA
AEKAYHEQLSV

SEQ ID NO: 92523 - protein, 11 aa, Homo sapiens
  Table A; Target 92523; HLA-B*49:01; TUBA3C; ENSG00000198033; TAA
AEKAYHEQLSV

SEQ ID NO: 92524 - protein, 9 aa, Homo sapiens
  Table A; Target 92524; HLA-A*23:01; TUBA3C; ENSG00000198033; TAA
AFMVDNEAI

SEQ ID NO: 92525 - protein, 9 aa, Homo sapiens
  Table A; Target 92525; HLA-A*24:02; TUBA3C; ENSG00000198033; TAA
AFMVDNEAI

SEQ ID NO: 92526 - protein, 9 aa, Homo sapiens
  Table A; Target 92526; HLA-B*55:01; TUBA3C; ENSG00000198033; TAA
AFMVDNEAI

SEQ ID NO: 92527 - protein, 9 aa, Homo sapiens
  Table A; Target 92527; HLA-C*01:02; TUBA3C; ENSG00000198033; TAA
AFMVDNEAI

SEQ ID NO: 92528 - protein, 9 aa, Homo sapiens
  Table A; Target 92528; HLA-C*04:01; TUBA3C; ENSG00000198033; TAA
AFMVDNEAI

SEQ ID NO: 92529 - protein, 9 aa, Homo sapiens
  Table A; Target 92529; HLA-C*14:02; TUBA3C; ENSG00000198033; TAA
AFMVDNEAI

SEQ ID NO: 92530 - protein, 10 aa, Homo sapiens
  Table A; Target 92530; HLA-A*23:01; TUBA3C; ENSG00000198033; TAA
AFMVDNEAIY

SEQ ID NO: 92531 - protein, 10 aa, Homo sapiens
  Table A; Target 92531; HLA-A*29:02; TUBA3C; ENSG00000198033; TAA
AFMVDNEAIY

SEQ ID NO: 92532 - protein, 10 aa, Homo sapiens
  Table A; Target 92532; HLA-A*30:02; TUBA3C; ENSG00000198033; TAA
AFMVDNEAIY

SEQ ID NO: 92533 - protein, 10 aa, Homo sapiens
  Table A; Target 92533; HLA-B*15:01; TUBA3C; ENSG00000198033; TAA
AFMVDNEAIY

SEQ ID NO: 92534 - protein, 10 aa, Homo sapiens
  Table A; Target 92534; HLA-C*14:02; TUBA3C; ENSG00000198033; TAA
AFMVDNEAIY

SEQ ID NO: 92535 - protein, 9 aa, Homo sapiens
  Table A; Target 92535; HLA-B*08:01; TUBA3C; ENSG00000198033; TAA
AGKHVPRAV

SEQ ID NO: 92536 - protein, 9 aa, Homo sapiens
  Table A; Target 92536; HLA-C*06:02; TUBA3C; ENSG00000198033; TAA
AGKHVPRAV

SEQ ID NO: 92537 - protein, 9 aa, Homo sapiens
  Table A; Target 92537; HLA-C*07:02; TUBA3C; ENSG00000198033; TAA
AGKHVPRAV

SEQ ID NO: 92538 - protein, 10 aa, Homo sapiens
  Table A; Target 92538; HLA-B*27:02; TUBA3C; ENSG00000198033; TAA
AGVQIGNACW

SEQ ID NO: 92539 - protein, 10 aa, Homo sapiens
  Table A; Target 92539; HLA-B*44:02; TUBA3C; ENSG00000198033; TAA
AGVQIGNACW

SEQ ID NO: 92540 - protein, 10 aa, Homo sapiens
  Table A; Target 92540; HLA-B*44:03; TUBA3C; ENSG00000198033; TAA
AGVQIGNACW

SEQ ID NO: 92541 - protein, 10 aa, Homo sapiens
  Table A; Target 92541; HLA-B*57:01; TUBA3C; ENSG00000198033; TAA
AGVQIGNACW

SEQ ID NO: 92542 - protein, 10 aa, Homo sapiens
  Table A; Target 92542; HLA-B*58:01; TUBA3C; ENSG00000198033; TAA
AGVQIGNACW

SEQ ID NO: 92543 - protein, 10 aa, Homo sapiens
  Table A; Target 92543; HLA-C*16:04; TUBA3C; ENSG00000198033; TAA
AGVQIGNACW

SEQ ID NO: 92544 - protein, 9 aa, Homo sapiens
  Table A; Target 92544; HLA-A*02:01; TUBA3C; ENSG00000198033; TAA
AIAEAWARL

SEQ ID NO: 92545 - protein, 9 aa, Homo sapiens
  Table A; Target 92545; HLA-A*02:03; TUBA3C; ENSG00000198033; TAA
AIAEAWARL

SEQ ID NO: 92546 - protein, 9 aa, Homo sapiens
  Table A; Target 92546; HLA-A*02:04; TUBA3C; ENSG00000198033; TAA
AIAEAWARL

SEQ ID NO: 92547 - protein, 9 aa, Homo sapiens
  Table A; Target 92547; HLA-A*02:07; TUBA3C; ENSG00000198033; TAA
AIAEAWARL

SEQ ID NO: 92548 - protein, 9 aa, Homo sapiens
  Table A; Target 92548; HLA-A*68:02; TUBA3C; ENSG00000198033; TAA
AIAEAWARL

SEQ ID NO: 92549 - protein, 9 aa, Homo sapiens
  Table A; Target 92549; HLA-B*07:02; TUBA3C; ENSG00000198033; TAA
AIAEAWARL

SEQ ID NO: 92550 - protein, 9 aa, Homo sapiens
  Table A; Target 92550; HLA-B*27:05; TUBA3C; ENSG00000198033; TAA
AIAEAWARL

SEQ ID NO: 92551 - protein, 9 aa, Homo sapiens
  Table A; Target 92551; HLA-C*01:02; TUBA3C; ENSG00000198033; TAA
AIAEAWARL

SEQ ID NO: 92552 - protein, 8 aa, Homo sapiens
  Table A; Target 92552; HLA-A*03:01; TUBA3C; ENSG00000198033; TAA
AIATIKTK

SEQ ID NO: 92553 - protein, 8 aa, Homo sapiens
  Table A; Target 92553; HLA-A*03:02; TUBA3C; ENSG00000198033; TAA
AIATIKTK

SEQ ID NO: 92554 - protein, 8 aa, Homo sapiens
  Table A; Target 92554; HLA-A*11:01; TUBA3C; ENSG00000198033; TAA
AIATIKTK

SEQ ID NO: 92555 - protein, 8 aa, Homo sapiens
  Table A; Target 92555; HLA-B*27:02; TUBA3C; ENSG00000198033; TAA
AIATIKTK

SEQ ID NO: 92556 - protein, 8 aa, Homo sapiens
  Table A; Target 92556; HLA-B*27:05; TUBA3C; ENSG00000198033; TAA
AIATIKTK

SEQ ID NO: 92557 - protein, 8 aa, Homo sapiens
  Table A; Target 92557; HLA-B*40:02; TUBA3C; ENSG00000198033; TAA
AIATIKTK

SEQ ID NO: 92558 - protein, 8 aa, Homo sapiens
  Table A; Target 92558; HLA-B*58:01; TUBA3C; ENSG00000198033; TAA
AIATIKTK

SEQ ID NO: 92559 - protein, 8 aa, Homo sapiens
  Table A; Target 92559; HLA-C*04:01; TUBA3C; ENSG00000198033; TAA
AIATIKTK

SEQ ID NO: 92560 - protein, 8 aa, Homo sapiens
  Table A; Target 92560; HLA-C*06:02; TUBA3C; ENSG00000198033; TAA
AIATIKTK

SEQ ID NO: 92561 - protein, 8 aa, Homo sapiens
  Table A; Target 92561; HLA-C*07:01; TUBA3C; ENSG00000198033; TAA
AIATIKTK

SEQ ID NO: 92562 - protein, 8 aa, Homo sapiens
  Table A; Target 92562; HLA-C*07:02; TUBA3C; ENSG00000198033; TAA
AIATIKTK

SEQ ID NO: 92563 - protein, 8 aa, Homo sapiens
  Table A; Target 92563; HLA-C*12:03; TUBA3C; ENSG00000198033; TAA
AIATIKTK

SEQ ID NO: 92564 - protein, 8 aa, Homo sapiens
  Table A; Target 92564; HLA-C*16:01; TUBA3C; ENSG00000198033; TAA
AIATIKTK

SEQ ID NO: 92565 - protein, 8 aa, Homo sapiens
  Table A; Target 92565; HLA-C*16:02; TUBA3C; ENSG00000198033; TAA
AIATIKTK

SEQ ID NO: 92566 - protein, 9 aa, Homo sapiens
  Table A; Target 92566; HLA-A*03:01; TUBA3C; ENSG00000198033; TAA
AIATIKTKR

SEQ ID NO: 92567 - protein, 9 aa, Homo sapiens
  Table A; Target 92567; HLA-A*03:02; TUBA3C; ENSG00000198033; TAA
AIATIKTKR

SEQ ID NO: 92568 - protein, 9 aa, Homo sapiens
  Table A; Target 92568; HLA-A*11:01; TUBA3C; ENSG00000198033; TAA
AIATIKTKR

SEQ ID NO: 92569 - protein, 9 aa, Homo sapiens
  Table A; Target 92569; HLA-A*31:01; TUBA3C; ENSG00000198033; TAA
AIATIKTKR

SEQ ID NO: 92570 - protein, 9 aa, Homo sapiens
  Table A; Target 92570; HLA-A*32:01; TUBA3C; ENSG00000198033; TAA
AIATIKTKR

SEQ ID NO: 92571 - protein, 9 aa, Homo sapiens
  Table A; Target 92571; HLA-A*33:01; TUBA3C; ENSG00000198033; TAA
AIATIKTKR

SEQ ID NO: 92572 - protein, 9 aa, Homo sapiens
  Table A; Target 92572; HLA-A*33:03; TUBA3C; ENSG00000198033; TAA
AIATIKTKR

SEQ ID NO: 92573 - protein, 9 aa, Homo sapiens
  Table A; Target 92573; HLA-A*68:01; TUBA3C; ENSG00000198033; TAA
AIATIKTKR

SEQ ID NO: 92574 - protein, 9 aa, Homo sapiens
  Table A; Target 92574; HLA-A*68:02; TUBA3C; ENSG00000198033; TAA
AIATIKTKR

SEQ ID NO: 92575 - protein, 9 aa, Homo sapiens
  Table A; Target 92575; HLA-B*27:05; TUBA3C; ENSG00000198033; TAA
AIATIKTKR

SEQ ID NO: 92576 - protein, 9 aa, Homo sapiens
  Table A; Target 92576; HLA-C*06:02; TUBA3C; ENSG00000198033; TAA
AIATIKTKR

SEQ ID NO: 92577 - protein, 9 aa, Homo sapiens
  Table A; Target 92577; HLA-C*07:06; TUBA3C; ENSG00000198033; TAA
AIATIKTKR

SEQ ID NO: 92578 - protein, 8 aa, Homo sapiens
  Table A; Target 92578; HLA-A*31:01; TUBA3C; ENSG00000198033; TAA
AIYDICRR

SEQ ID NO: 92579 - protein, 10 aa, Homo sapiens
  Table A; Target 92579; HLA-A*03:01; TUBA3C; ENSG00000198033; TAA
AIYDICRRNL

SEQ ID NO: 92580 - protein, 8 aa, Homo sapiens
  Table A; Target 92580; HLA-A*02:01; TUBA3C; ENSG00000198033; TAA
AIYPAPQV

SEQ ID NO: 92581 - protein, 8 aa, Homo sapiens
  Table A; Target 92581; HLA-A*02:03; TUBA3C; ENSG00000198033; TAA
AIYPAPQV

SEQ ID NO: 92582 - protein, 8 aa, Homo sapiens
  Table A; Target 92582; HLA-A*02:04; TUBA3C; ENSG00000198033; TAA
AIYPAPQV

SEQ ID NO: 92583 - protein, 8 aa, Homo sapiens
  Table A; Target 92583; HLA-A*02:07; TUBA3C; ENSG00000198033; TAA
AIYPAPQV

SEQ ID NO: 92584 - protein, 8 aa, Homo sapiens
  Table A; Target 92584; HLA-A*30:01; TUBA3C; ENSG00000198033; TAA
AIYPAPQV

SEQ ID NO: 92585 - protein, 8 aa, Homo sapiens
  Table A; Target 92585; HLA-A*32:01; TUBA3C; ENSG00000198033; TAA
AIYPAPQV

SEQ ID NO: 92586 - protein, 8 aa, Homo sapiens
  Table A; Target 92586; HLA-A*68:02; TUBA3C; ENSG00000198033; TAA
AIYPAPQV

SEQ ID NO: 92587 - protein, 8 aa, Homo sapiens
  Table A; Target 92587; HLA-B*08:01; TUBA3C; ENSG00000198033; TAA
AIYPAPQV

SEQ ID NO: 92588 - protein, 8 aa, Homo sapiens
  Table A; Target 92588; HLA-B*13:02; TUBA3C; ENSG00000198033; TAA
AIYPAPQV

SEQ ID NO: 92589 - protein, 8 aa, Homo sapiens
  Table A; Target 92589; HLA-B*15:03; TUBA3C; ENSG00000198033; TAA
AIYPAPQV

SEQ ID NO: 92590 - protein, 8 aa, Homo sapiens
  Table A; Target 92590; HLA-B*27:05; TUBA3C; ENSG00000198033; TAA
AIYPAPQV

SEQ ID NO: 92591 - protein, 8 aa, Homo sapiens
  Table A; Target 92591; HLA-B*37:01; TUBA3C; ENSG00000198033; TAA
AIYPAPQV

SEQ ID NO: 92592 - protein, 8 aa, Homo sapiens
  Table A; Target 92592; HLA-B*39:01; TUBA3C; ENSG00000198033; TAA
AIYPAPQV

SEQ ID NO: 92593 - protein, 8 aa, Homo sapiens
  Table A; Target 92593; HLA-B*40:02; TUBA3C; ENSG00000198033; TAA
AIYPAPQV

SEQ ID NO: 92594 - protein, 8 aa, Homo sapiens
  Table A; Target 92594; HLA-B*46:01; TUBA3C; ENSG00000198033; TAA
AIYPAPQV

SEQ ID NO: 92595 - protein, 8 aa, Homo sapiens
  Table A; Target 92595; HLA-B*49:01; TUBA3C; ENSG00000198033; TAA
AIYPAPQV

SEQ ID NO: 92596 - protein, 8 aa, Homo sapiens
  Table A; Target 92596; HLA-B*51:01; TUBA3C; ENSG00000198033; TAA
AIYPAPQV

SEQ ID NO: 92597 - protein, 8 aa, Homo sapiens
  Table A; Target 92597; HLA-B*54:01; TUBA3C; ENSG00000198033; TAA
AIYPAPQV

SEQ ID NO: 92598 - protein, 8 aa, Homo sapiens
  Table A; Target 92598; HLA-B*55:01; TUBA3C; ENSG00000198033; TAA
AIYPAPQV

SEQ ID NO: 92599 - protein, 8 aa, Homo sapiens
  Table A; Target 92599; HLA-B*56:01; TUBA3C; ENSG00000198033; TAA
AIYPAPQV

SEQ ID NO: 92600 - protein, 8 aa, Homo sapiens
  Table A; Target 92600; HLA-B*58:01; TUBA3C; ENSG00000198033; TAA
AIYPAPQV

SEQ ID NO: 92601 - protein, 8 aa, Homo sapiens
  Table A; Target 92601; HLA-C*01:02; TUBA3C; ENSG00000198033; TAA
AIYPAPQV

SEQ ID NO: 92602 - protein, 8 aa, Homo sapiens
  Table A; Target 92602; HLA-C*02:02; TUBA3C; ENSG00000198033; TAA
AIYPAPQV

SEQ ID NO: 92603 - protein, 8 aa, Homo sapiens
  Table A; Target 92603; HLA-C*03:03; TUBA3C; ENSG00000198033; TAA
AIYPAPQV

SEQ ID NO: 92604 - protein, 8 aa, Homo sapiens
  Table A; Target 92604; HLA-C*03:04; TUBA3C; ENSG00000198033; TAA
AIYPAPQV

SEQ ID NO: 92605 - protein, 8 aa, Homo sapiens
  Table A; Target 92605; HLA-C*04:01; TUBA3C; ENSG00000198033; TAA
AIYPAPQV

SEQ ID NO: 92606 - protein, 8 aa, Homo sapiens
  Table A; Target 92606; HLA-C*05:01; TUBA3C; ENSG00000198033; TAA
AIYPAPQV

SEQ ID NO: 92607 - protein, 8 aa, Homo sapiens
  Table A; Target 92607; HLA-C*06:02; TUBA3C; ENSG00000198033; TAA
AIYPAPQV

SEQ ID NO: 92608 - protein, 8 aa, Homo sapiens
  Table A; Target 92608; HLA-C*07:01; TUBA3C; ENSG00000198033; TAA
AIYPAPQV

SEQ ID NO: 92609 - protein, 8 aa, Homo sapiens
  Table A; Target 92609; HLA-C*07:02; TUBA3C; ENSG00000198033; TAA
AIYPAPQV

SEQ ID NO: 92610 - protein, 8 aa, Homo sapiens
  Table A; Target 92610; HLA-C*12:03; TUBA3C; ENSG00000198033; TAA
AIYPAPQV

SEQ ID NO: 92611 - protein, 8 aa, Homo sapiens
  Table A; Target 92611; HLA-C*16:01; TUBA3C; ENSG00000198033; TAA
AIYPAPQV

SEQ ID NO: 92612 - protein, 8 aa, Homo sapiens
  Table A; Target 92612; HLA-C*16:02; TUBA3C; ENSG00000198033; TAA
AIYPAPQV

SEQ ID NO: 92613 - protein, 8 aa, Homo sapiens
  Table A; Target 92613; HLA-C*16:04; TUBA3C; ENSG00000198033; TAA
AIYPAPQV

SEQ ID NO: 92614 - protein, 9 aa, Homo sapiens
  Table A; Target 92614; HLA-A*02:01; TUBA3C; ENSG00000198033; TAA
AIYPAPQVS

SEQ ID NO: 92615 - protein, 9 aa, Homo sapiens
  Table A; Target 92615; HLA-A*02:03; TUBA3C; ENSG00000198033; TAA
AIYPAPQVS

SEQ ID NO: 92616 - protein, 9 aa, Homo sapiens
  Table A; Target 92616; HLA-A*03:01; TUBA3C; ENSG00000198033; TAA
AIYPAPQVS

SEQ ID NO: 92617 - protein, 9 aa, Homo sapiens
  Table A; Target 92617; HLA-A*03:02; TUBA3C; ENSG00000198033; TAA
AIYPAPQVS

SEQ ID NO: 92618 - protein, 9 aa, Homo sapiens
  Table A; Target 92618; HLA-A*31:01; TUBA3C; ENSG00000198033; TAA
AIYPAPQVS

SEQ ID NO: 92619 - protein, 9 aa, Homo sapiens
  Table A; Target 92619; HLA-A*32:01; TUBA3C; ENSG00000198033; TAA
AIYPAPQVS

SEQ ID NO: 92620 - protein, 9 aa, Homo sapiens
  Table A; Target 92620; HLA-B*13:02; TUBA3C; ENSG00000198033; TAA
AIYPAPQVS

SEQ ID NO: 92621 - protein, 9 aa, Homo sapiens
  Table A; Target 92621; HLA-B*15:01; TUBA3C; ENSG00000198033; TAA
AIYPAPQVS

SEQ ID NO: 92622 - protein, 9 aa, Homo sapiens
  Table A; Target 92622; HLA-B*15:03; TUBA3C; ENSG00000198033; TAA
AIYPAPQVS

SEQ ID NO: 92623 - protein, 9 aa, Homo sapiens
  Table A; Target 92623; HLA-B*27:05; TUBA3C; ENSG00000198033; TAA
AIYPAPQVS

SEQ ID NO: 92624 - protein, 9 aa, Homo sapiens
  Table A; Target 92624; HLA-B*39:01; TUBA3C; ENSG00000198033; TAA
AIYPAPQVS

SEQ ID NO: 92625 - protein, 9 aa, Homo sapiens
  Table A; Target 92625; HLA-B*40:02; TUBA3C; ENSG00000198033; TAA
AIYPAPQVS

SEQ ID NO: 92626 - protein, 9 aa, Homo sapiens
  Table A; Target 92626; HLA-C*04:01; TUBA3C; ENSG00000198033; TAA
AIYPAPQVS

SEQ ID NO: 92627 - protein, 9 aa, Homo sapiens
  Table A; Target 92627; HLA-C*06:02; TUBA3C; ENSG00000198033; TAA
AIYPAPQVS

SEQ ID NO: 92628 - protein, 9 aa, Homo sapiens
  Table A; Target 92628; HLA-C*07:04; TUBA3C; ENSG00000198033; TAA
AIYPAPQVS

SEQ ID NO: 92629 - protein, 9 aa, Homo sapiens
  Table A; Target 92629; HLA-C*12:03; TUBA3C; ENSG00000198033; TAA
AIYPAPQVS

SEQ ID NO: 92630 - protein, 9 aa, Homo sapiens
  Table A; Target 92630; HLA-C*16:02; TUBA3C; ENSG00000198033; TAA
AIYPAPQVS

SEQ ID NO: 92631 - protein, 10 aa, Homo sapiens
  Table A; Target 92631; HLA-A*02:01; TUBA3C; ENSG00000198033; TAA
AIYPAPQVST

SEQ ID NO: 92632 - protein, 10 aa, Homo sapiens
  Table A; Target 92632; HLA-A*02:03; TUBA3C; ENSG00000198033; TAA
AIYPAPQVST

SEQ ID NO: 92633 - protein, 10 aa, Homo sapiens
  Table A; Target 92633; HLA-A*03:01; TUBA3C; ENSG00000198033; TAA
AIYPAPQVST

SEQ ID NO: 92634 - protein, 10 aa, Homo sapiens
  Table A; Target 92634; HLA-A*03:02; TUBA3C; ENSG00000198033; TAA
AIYPAPQVST

SEQ ID NO: 92635 - protein, 10 aa, Homo sapiens
  Table A; Target 92635; HLA-A*11:01; TUBA3C; ENSG00000198033; TAA
AIYPAPQVST

SEQ ID NO: 92636 - protein, 10 aa, Homo sapiens
  Table A; Target 92636; HLA-A*31:01; TUBA3C; ENSG00000198033; TAA
AIYPAPQVST

SEQ ID NO: 92637 - protein, 10 aa, Homo sapiens
  Table A; Target 92637; HLA-A*32:01; TUBA3C; ENSG00000198033; TAA
AIYPAPQVST

SEQ ID NO: 92638 - protein, 10 aa, Homo sapiens
  Table A; Target 92638; HLA-B*07:02; TUBA3C; ENSG00000198033; TAA
AIYPAPQVST

SEQ ID NO: 92639 - protein, 10 aa, Homo sapiens
  Table A; Target 92639; HLA-B*13:02; TUBA3C; ENSG00000198033; TAA
AIYPAPQVST

SEQ ID NO: 92640 - protein, 10 aa, Homo sapiens
  Table A; Target 92640; HLA-B*15:01; TUBA3C; ENSG00000198033; TAA
AIYPAPQVST

SEQ ID NO: 92641 - protein, 10 aa, Homo sapiens
  Table A; Target 92641; HLA-B*27:05; TUBA3C; ENSG00000198033; TAA
AIYPAPQVST

SEQ ID NO: 92642 - protein, 10 aa, Homo sapiens
  Table A; Target 92642; HLA-B*40:02; TUBA3C; ENSG00000198033; TAA
AIYPAPQVST

SEQ ID NO: 92643 - protein, 10 aa, Homo sapiens
  Table A; Target 92643; HLA-B*46:01; TUBA3C; ENSG00000198033; TAA
AIYPAPQVST

SEQ ID NO: 92644 - protein, 10 aa, Homo sapiens
  Table A; Target 92644; HLA-B*54:01; TUBA3C; ENSG00000198033; TAA
AIYPAPQVST

SEQ ID NO: 92645 - protein, 10 aa, Homo sapiens
  Table A; Target 92645; HLA-B*56:01; TUBA3C; ENSG00000198033; TAA
AIYPAPQVST

SEQ ID NO: 92646 - protein, 10 aa, Homo sapiens
  Table A; Target 92646; HLA-B*57:01; TUBA3C; ENSG00000198033; TAA
AIYPAPQVST

SEQ ID NO: 92647 - protein, 10 aa, Homo sapiens
  Table A; Target 92647; HLA-B*58:01; TUBA3C; ENSG00000198033; TAA
AIYPAPQVST

SEQ ID NO: 92648 - protein, 10 aa, Homo sapiens
  Table A; Target 92648; HLA-C*01:02; TUBA3C; ENSG00000198033; TAA
AIYPAPQVST

SEQ ID NO: 92649 - protein, 10 aa, Homo sapiens
  Table A; Target 92649; HLA-C*03:03; TUBA3C; ENSG00000198033; TAA
AIYPAPQVST

SEQ ID NO: 92650 - protein, 10 aa, Homo sapiens
  Table A; Target 92650; HLA-C*03:04; TUBA3C; ENSG00000198033; TAA
AIYPAPQVST

SEQ ID NO: 92651 - protein, 10 aa, Homo sapiens
  Table A; Target 92651; HLA-C*04:01; TUBA3C; ENSG00000198033; TAA
AIYPAPQVST

SEQ ID NO: 92652 - protein, 10 aa, Homo sapiens
  Table A; Target 92652; HLA-C*06:02; TUBA3C; ENSG00000198033; TAA
AIYPAPQVST

SEQ ID NO: 92653 - protein, 10 aa, Homo sapiens
  Table A; Target 92653; HLA-C*16:04; TUBA3C; ENSG00000198033; TAA
AIYPAPQVST

SEQ ID NO: 92654 - protein, 11 aa, Homo sapiens
  Table A; Target 92654; HLA-A*02:01; TUBA3C; ENSG00000198033; TAA
AIYPAPQVSTA

SEQ ID NO: 92655 - protein, 11 aa, Homo sapiens
  Table A; Target 92655; HLA-A*02:03; TUBA3C; ENSG00000198033; TAA
AIYPAPQVSTA

SEQ ID NO: 92656 - protein, 11 aa, Homo sapiens
  Table A; Target 92656; HLA-A*02:04; TUBA3C; ENSG00000198033; TAA
AIYPAPQVSTA

SEQ ID NO: 92657 - protein, 11 aa, Homo sapiens
  Table A; Target 92657; HLA-A*02:07; TUBA3C; ENSG00000198033; TAA
AIYPAPQVSTA

SEQ ID NO: 92658 - protein, 11 aa, Homo sapiens
  Table A; Target 92658; HLA-A*03:01; TUBA3C; ENSG00000198033; TAA
AIYPAPQVSTA

SEQ ID NO: 92659 - protein, 11 aa, Homo sapiens
  Table A; Target 92659; HLA-A*03:02; TUBA3C; ENSG00000198033; TAA
AIYPAPQVSTA

SEQ ID NO: 92660 - protein, 11 aa, Homo sapiens
  Table A; Target 92660; HLA-A*26:01; TUBA3C; ENSG00000198033; TAA
AIYPAPQVSTA

SEQ ID NO: 92661 - protein, 11 aa, Homo sapiens
  Table A; Target 92661; HLA-B*13:02; TUBA3C; ENSG00000198033; TAA
AIYPAPQVSTA

SEQ ID NO: 92662 - protein, 11 aa, Homo sapiens
  Table A; Target 92662; HLA-B*15:01; TUBA3C; ENSG00000198033; TAA
AIYPAPQVSTA

SEQ ID NO: 92663 - protein, 11 aa, Homo sapiens
  Table A; Target 92663; HLA-B*46:01; TUBA3C; ENSG00000198033; TAA
AIYPAPQVSTA

SEQ ID NO: 92664 - protein, 11 aa, Homo sapiens
  Table A; Target 92664; HLA-B*55:01; TUBA3C; ENSG00000198033; TAA
AIYPAPQVSTA

SEQ ID NO: 92665 - protein, 11 aa, Homo sapiens
  Table A; Target 92665; HLA-B*56:01; TUBA3C; ENSG00000198033; TAA
AIYPAPQVSTA

SEQ ID NO: 92666 - protein, 11 aa, Homo sapiens
  Table A; Target 92666; HLA-B*58:01; TUBA3C; ENSG00000198033; TAA
AIYPAPQVSTA

SEQ ID NO: 92667 - protein, 11 aa, Homo sapiens
  Table A; Target 92667; HLA-C*12:03; TUBA3C; ENSG00000198033; TAA
AIYPAPQVSTA

SEQ ID NO: 92668 - protein, 9 aa, Homo sapiens
  Table A; Target 92668; HLA-B*15:03; TUBA3C; ENSG00000198033; TAA
AKVQRAVCM

SEQ ID NO: 92669 - protein, 9 aa, Homo sapiens
  Table A; Target 92669; HLA-A*02:01; TUBA3C; ENSG00000198033; TAA
ALEKDYEEV

SEQ ID NO: 92670 - protein, 9 aa, Homo sapiens
  Table A; Target 92670; HLA-A*02:07; TUBA3C; ENSG00000198033; TAA
ALEKDYEEV

SEQ ID NO: 92671 - protein, 9 aa, Homo sapiens
  Table A; Target 92671; HLA-B*55:01; TUBA3C; ENSG00000198033; TAA
ALEKDYEEV

SEQ ID NO: 92672 - protein, 9 aa, Homo sapiens
  Table A; Target 92672; HLA-A*02:01; TUBA3C; ENSG00000198033; TAA
ALNVDLTEF

SEQ ID NO: 92673 - protein, 9 aa, Homo sapiens
  Table A; Target 92673; HLA-A*02:03; TUBA3C; ENSG00000198033; TAA
ALNVDLTEF

SEQ ID NO: 92674 - protein, 9 aa, Homo sapiens
  Table A; Target 92674; HLA-A*02:04; TUBA3C; ENSG00000198033; TAA
ALNVDLTEF

SEQ ID NO: 92675 - protein, 9 aa, Homo sapiens
  Table A; Target 92675; HLA-A*02:07; TUBA3C; ENSG00000198033; TAA
ALNVDLTEF

SEQ ID NO: 92676 - protein, 9 aa, Homo sapiens
  Table A; Target 92676; HLA-A*03:01; TUBA3C; ENSG00000198033; TAA
ALNVDLTEF

SEQ ID NO: 92677 - protein, 9 aa, Homo sapiens
  Table A; Target 92677; HLA-A*03:02; TUBA3C; ENSG00000198033; TAA
ALNVDLTEF

SEQ ID NO: 92678 - protein, 9 aa, Homo sapiens
  Table A; Target 92678; HLA-A*23:01; TUBA3C; ENSG00000198033; TAA
ALNVDLTEF

SEQ ID NO: 92679 - protein, 9 aa, Homo sapiens
  Table A; Target 92679; HLA-A*24:02; TUBA3C; ENSG00000198033; TAA
ALNVDLTEF

SEQ ID NO: 92680 - protein, 9 aa, Homo sapiens
  Table A; Target 92680; HLA-A*25:01; TUBA3C; ENSG00000198033; TAA
ALNVDLTEF

SEQ ID NO: 92681 - protein, 9 aa, Homo sapiens
  Table A; Target 92681; HLA-A*26:01; TUBA3C; ENSG00000198033; TAA
ALNVDLTEF

SEQ ID NO: 92682 - protein, 9 aa, Homo sapiens
  Table A; Target 92682; HLA-A*29:02; TUBA3C; ENSG00000198033; TAA
ALNVDLTEF

SEQ ID NO: 92683 - protein, 9 aa, Homo sapiens
  Table A; Target 92683; HLA-A*30:02; TUBA3C; ENSG00000198033; TAA
ALNVDLTEF

SEQ ID NO: 92684 - protein, 9 aa, Homo sapiens
  Table A; Target 92684; HLA-A*31:01; TUBA3C; ENSG00000198033; TAA
ALNVDLTEF

SEQ ID NO: 92685 - protein, 9 aa, Homo sapiens
  Table A; Target 92685; HLA-A*32:01; TUBA3C; ENSG00000198033; TAA
ALNVDLTEF

SEQ ID NO: 92686 - protein, 9 aa, Homo sapiens
  Table A; Target 92686; HLA-B*07:02; TUBA3C; ENSG00000198033; TAA
ALNVDLTEF

SEQ ID NO: 92687 - protein, 9 aa, Homo sapiens
  Table A; Target 92687; HLA-B*13:02; TUBA3C; ENSG00000198033; TAA
ALNVDLTEF

SEQ ID NO: 92688 - protein, 9 aa, Homo sapiens
  Table A; Target 92688; HLA-B*15:01; TUBA3C; ENSG00000198033; TAA
ALNVDLTEF

SEQ ID NO: 92689 - protein, 9 aa, Homo sapiens
  Table A; Target 92689; HLA-B*15:03; TUBA3C; ENSG00000198033; TAA
ALNVDLTEF

SEQ ID NO: 92690 - protein, 9 aa, Homo sapiens
  Table A; Target 92690; HLA-B*27:02; TUBA3C; ENSG00000198033; TAA
ALNVDLTEF

SEQ ID NO: 92691 - protein, 9 aa, Homo sapiens
  Table A; Target 92691; HLA-B*27:05; TUBA3C; ENSG00000198033; TAA
ALNVDLTEF

SEQ ID NO: 92692 - protein, 9 aa, Homo sapiens
  Table A; Target 92692; HLA-B*35:01; TUBA3C; ENSG00000198033; TAA
ALNVDLTEF

SEQ ID NO: 92693 - protein, 9 aa, Homo sapiens
  Table A; Target 92693; HLA-B*37:01; TUBA3C; ENSG00000198033; TAA
ALNVDLTEF

SEQ ID NO: 92694 - protein, 9 aa, Homo sapiens
  Table A; Target 92694; HLA-B*38:01; TUBA3C; ENSG00000198033; TAA
ALNVDLTEF

SEQ ID NO: 92695 - protein, 9 aa, Homo sapiens
  Table A; Target 92695; HLA-B*39:01; TUBA3C; ENSG00000198033; TAA
ALNVDLTEF

SEQ ID NO: 92696 - protein, 9 aa, Homo sapiens
  Table A; Target 92696; HLA-B*40:02; TUBA3C; ENSG00000198033; TAA
ALNVDLTEF

SEQ ID NO: 92697 - protein, 9 aa, Homo sapiens
  Table A; Target 92697; HLA-B*44:02; TUBA3C; ENSG00000198033; TAA
ALNVDLTEF

SEQ ID NO: 92698 - protein, 9 aa, Homo sapiens
  Table A; Target 92698; HLA-B*44:03; TUBA3C; ENSG00000198033; TAA
ALNVDLTEF

SEQ ID NO: 92699 - protein, 9 aa, Homo sapiens
  Table A; Target 92699; HLA-B*46:01; TUBA3C; ENSG00000198033; TAA
ALNVDLTEF

SEQ ID NO: 92700 - protein, 9 aa, Homo sapiens
  Table A; Target 92700; HLA-B*55:01; TUBA3C; ENSG00000198033; TAA
ALNVDLTEF

SEQ ID NO: 92701 - protein, 9 aa, Homo sapiens
  Table A; Target 92701; HLA-B*57:01; TUBA3C; ENSG00000198033; TAA
ALNVDLTEF

SEQ ID NO: 92702 - protein, 9 aa, Homo sapiens
  Table A; Target 92702; HLA-B*58:01; TUBA3C; ENSG00000198033; TAA
ALNVDLTEF

SEQ ID NO: 92703 - protein, 9 aa, Homo sapiens
  Table A; Target 92703; HLA-C*01:02; TUBA3C; ENSG00000198033; TAA
ALNVDLTEF

SEQ ID NO: 92704 - protein, 9 aa, Homo sapiens
  Table A; Target 92704; HLA-C*02:02; TUBA3C; ENSG00000198033; TAA
ALNVDLTEF

SEQ ID NO: 92705 - protein, 9 aa, Homo sapiens
  Table A; Target 92705; HLA-C*03:03; TUBA3C; ENSG00000198033; TAA
ALNVDLTEF

SEQ ID NO: 92706 - protein, 9 aa, Homo sapiens
  Table A; Target 92706; HLA-C*04:01; TUBA3C; ENSG00000198033; TAA
ALNVDLTEF

SEQ ID NO: 92707 - protein, 9 aa, Homo sapiens
  Table A; Target 92707; HLA-C*05:01; TUBA3C; ENSG00000198033; TAA
ALNVDLTEF

SEQ ID NO: 92708 - protein, 9 aa, Homo sapiens
  Table A; Target 92708; HLA-C*07:02; TUBA3C; ENSG00000198033; TAA
ALNVDLTEF

SEQ ID NO: 92709 - protein, 9 aa, Homo sapiens
  Table A; Target 92709; HLA-C*07:04; TUBA3C; ENSG00000198033; TAA
ALNVDLTEF

SEQ ID NO: 92710 - protein, 9 aa, Homo sapiens
  Table A; Target 92710; HLA-C*12:03; TUBA3C; ENSG00000198033; TAA
ALNVDLTEF

SEQ ID NO: 92711 - protein, 9 aa, Homo sapiens
  Table A; Target 92711; HLA-C*14:02; TUBA3C; ENSG00000198033; TAA
ALNVDLTEF

SEQ ID NO: 92712 - protein, 9 aa, Homo sapiens
  Table A; Target 92712; HLA-C*16:01; TUBA3C; ENSG00000198033; TAA
ALNVDLTEF

SEQ ID NO: 92713 - protein, 9 aa, Homo sapiens
  Table A; Target 92713; HLA-C*16:04; TUBA3C; ENSG00000198033; TAA
ALNVDLTEF

SEQ ID NO: 92714 - protein, 9 aa, Homo sapiens
  Table A; Target 92714; HLA-A*29:02; TUBA3C; ENSG00000198033; TAA
ANNYARGHY

SEQ ID NO: 92715 - protein, 9 aa, Homo sapiens
  Table A; Target 92715; HLA-A*30:02; TUBA3C; ENSG00000198033; TAA
ANNYARGHY

SEQ ID NO: 92716 - protein, 9 aa, Homo sapiens
  Table A; Target 92716; HLA-A*32:01; TUBA3C; ENSG00000198033; TAA
ANNYARGHY

SEQ ID NO: 92717 - protein, 9 aa, Homo sapiens
  Table A; Target 92717; HLA-C*04:01; TUBA3C; ENSG00000198033; TAA
ANNYARGHY

SEQ ID NO: 92718 - protein, 9 aa, Homo sapiens
  Table A; Target 92718; HLA-C*16:01; TUBA3C; ENSG00000198033; TAA
ANNYARGHY

SEQ ID NO: 92719 - protein, 8 aa, Homo sapiens
  Table A; Target 92719; HLA-B*07:02; TUBA3C; ENSG00000198033; TAA
APQVSTAV

SEQ ID NO: 92720 - protein, 8 aa, Homo sapiens
  Table A; Target 92720; HLA-B*56:01; TUBA3C; ENSG00000198033; TAA
APQVSTAV

SEQ ID NO: 92721 - protein, 8 aa, Homo sapiens
  Table A; Target 92721; HLA-C*07:02; TUBA3C; ENSG00000198033; TAA
APQVSTAV

SEQ ID NO: 92722 - protein, 9 aa, Homo sapiens
  Table A; Target 92722; HLA-B*07:02; TUBA3C; ENSG00000198033; TAA
APQVSTAVV

SEQ ID NO: 92723 - protein, 9 aa, Homo sapiens
  Table A; Target 92723; HLA-B*35:01; TUBA3C; ENSG00000198033; TAA
APQVSTAVV

SEQ ID NO: 92724 - protein, 9 aa, Homo sapiens
  Table A; Target 92724; HLA-B*35:03; TUBA3C; ENSG00000198033; TAA
APQVSTAVV

SEQ ID NO: 92725 - protein, 9 aa, Homo sapiens
  Table A; Target 92725; HLA-B*49:01; TUBA3C; ENSG00000198033; TAA
APQVSTAVV

SEQ ID NO: 92726 - protein, 9 aa, Homo sapiens
  Table A; Target 92726; HLA-B*51:01; TUBA3C; ENSG00000198033; TAA
APQVSTAVV

SEQ ID NO: 92727 - protein, 9 aa, Homo sapiens
  Table A; Target 92727; HLA-B*54:01; TUBA3C; ENSG00000198033; TAA
APQVSTAVV

SEQ ID NO: 92728 - protein, 9 aa, Homo sapiens
  Table A; Target 92728; HLA-B*55:01; TUBA3C; ENSG00000198033; TAA
APQVSTAVV

SEQ ID NO: 92729 - protein, 9 aa, Homo sapiens
  Table A; Target 92729; HLA-B*56:01; TUBA3C; ENSG00000198033; TAA
APQVSTAVV

SEQ ID NO: 92730 - protein, 9 aa, Homo sapiens
  Table A; Target 92730; HLA-C*01:02; TUBA3C; ENSG00000198033; TAA
APQVSTAVV

SEQ ID NO: 92731 - protein, 9 aa, Homo sapiens
  Table A; Target 92731; HLA-C*04:01; TUBA3C; ENSG00000198033; TAA
APQVSTAVV

SEQ ID NO: 92732 - protein, 9 aa, Homo sapiens
  Table A; Target 92732; HLA-C*07:02; TUBA3C; ENSG00000198033; TAA
APQVSTAVV

SEQ ID NO: 92733 - protein, 9 aa, Homo sapiens
  Table A; Target 92733; HLA-C*14:02; TUBA3C; ENSG00000198033; TAA
APQVSTAVV

SEQ ID NO: 92734 - protein, 11 aa, Homo sapiens
  Table A; Target 92734; HLA-B*56:01; TUBA3C; ENSG00000198033; TAA
APQVSTAVVEP

SEQ ID NO: 92735 - protein, 8 aa, Homo sapiens
  Table A; Target 92735; HLA-B*07:02; TUBA3C; ENSG00000198033; TAA
APVISAEK

SEQ ID NO: 92736 - protein, 8 aa, Homo sapiens
  Table A; Target 92736; HLA-B*27:02; TUBA3C; ENSG00000198033; TAA
APVISAEK

SEQ ID NO: 92737 - protein, 8 aa, Homo sapiens
  Table A; Target 92737; HLA-B*35:01; TUBA3C; ENSG00000198033; TAA
APVISAEK

SEQ ID NO: 92738 - protein, 8 aa, Homo sapiens
  Table A; Target 92738; HLA-B*51:01; TUBA3C; ENSG00000198033; TAA
APVISAEK

SEQ ID NO: 92739 - protein, 8 aa, Homo sapiens
  Table A; Target 92739; HLA-B*55:01; TUBA3C; ENSG00000198033; TAA
APVISAEK

SEQ ID NO: 92740 - protein, 8 aa, Homo sapiens
  Table A; Target 92740; HLA-B*56:01; TUBA3C; ENSG00000198033; TAA
APVISAEK

SEQ ID NO: 92741 - protein, 8 aa, Homo sapiens
  Table A; Target 92741; HLA-C*07:01; TUBA3C; ENSG00000198033; TAA
APVISAEK

SEQ ID NO: 92742 - protein, 8 aa, Homo sapiens
  Table A; Target 92742; HLA-C*07:02; TUBA3C; ENSG00000198033; TAA
APVISAEK

SEQ ID NO: 92743 - protein, 9 aa, Homo sapiens
  Table A; Target 92743; HLA-B*07:02; TUBA3C; ENSG00000198033; TAA
APVISAEKA

SEQ ID NO: 92744 - protein, 9 aa, Homo sapiens
  Table A; Target 92744; HLA-B*35:03; TUBA3C; ENSG00000198033; TAA
APVISAEKA

SEQ ID NO: 92745 - protein, 9 aa, Homo sapiens
  Table A; Target 92745; HLA-B*54:01; TUBA3C; ENSG00000198033; TAA
APVISAEKA

SEQ ID NO: 92746 - protein, 9 aa, Homo sapiens
  Table A; Target 92746; HLA-B*55:01; TUBA3C; ENSG00000198033; TAA
APVISAEKA

SEQ ID NO: 92747 - protein, 9 aa, Homo sapiens
  Table A; Target 92747; HLA-B*56:01; TUBA3C; ENSG00000198033; TAA
APVISAEKA

SEQ ID NO: 92748 - protein, 9 aa, Homo sapiens
  Table A; Target 92748; HLA-C*06:02; TUBA3C; ENSG00000198033; TAA
APVISAEKA

SEQ ID NO: 92749 - protein, 9 aa, Homo sapiens
  Table A; Target 92749; HLA-C*07:02; TUBA3C; ENSG00000198033; TAA
APVISAEKA

SEQ ID NO: 92750 - protein, 10 aa, Homo sapiens
  Table A; Target 92750; HLA-A*30:02; TUBA3C; ENSG00000198033; TAA
APVISAEKAY

SEQ ID NO: 92751 - protein, 10 aa, Homo sapiens
  Table A; Target 92751; HLA-B*07:02; TUBA3C; ENSG00000198033; TAA
APVISAEKAY

SEQ ID NO: 92752 - protein, 10 aa, Homo sapiens
  Table A; Target 92752; HLA-B*15:01; TUBA3C; ENSG00000198033; TAA
APVISAEKAY

SEQ ID NO: 92753 - protein, 10 aa, Homo sapiens
  Table A; Target 92753; HLA-B*15:03; TUBA3C; ENSG00000198033; TAA
APVISAEKAY

SEQ ID NO: 92754 - protein, 10 aa, Homo sapiens
  Table A; Target 92754; HLA-B*35:01; TUBA3C; ENSG00000198033; TAA
APVISAEKAY

SEQ ID NO: 92755 - protein, 10 aa, Homo sapiens
  Table A; Target 92755; HLA-B*44:02; TUBA3C; ENSG00000198033; TAA
APVISAEKAY

SEQ ID NO: 92756 - protein, 10 aa, Homo sapiens
  Table A; Target 92756; HLA-B*44:03; TUBA3C; ENSG00000198033; TAA
APVISAEKAY

SEQ ID NO: 92757 - protein, 10 aa, Homo sapiens
  Table A; Target 92757; HLA-B*55:01; TUBA3C; ENSG00000198033; TAA
APVISAEKAY

SEQ ID NO: 92758 - protein, 10 aa, Homo sapiens
  Table A; Target 92758; HLA-B*56:01; TUBA3C; ENSG00000198033; TAA
APVISAEKAY

SEQ ID NO: 92759 - protein, 10 aa, Homo sapiens
  Table A; Target 92759; HLA-C*01:02; TUBA3C; ENSG00000198033; TAA
APVISAEKAY

SEQ ID NO: 92760 - protein, 10 aa, Homo sapiens
  Table A; Target 92760; HLA-C*03:03; TUBA3C; ENSG00000198033; TAA
APVISAEKAY

SEQ ID NO: 92761 - protein, 10 aa, Homo sapiens
  Table A; Target 92761; HLA-C*04:01; TUBA3C; ENSG00000198033; TAA
APVISAEKAY

SEQ ID NO: 92762 - protein, 10 aa, Homo sapiens
  Table A; Target 92762; HLA-C*07:01; TUBA3C; ENSG00000198033; TAA
APVISAEKAY

SEQ ID NO: 92763 - protein, 10 aa, Homo sapiens
  Table A; Target 92763; HLA-C*07:02; TUBA3C; ENSG00000198033; TAA
APVISAEKAY

SEQ ID NO: 92764 - protein, 10 aa, Homo sapiens
  Table A; Target 92764; HLA-C*16:01; TUBA3C; ENSG00000198033; TAA
APVISAEKAY

SEQ ID NO: 92765 - protein, 10 aa, Homo sapiens
  Table A; Target 92765; HLA-C*16:02; TUBA3C; ENSG00000198033; TAA
APVISAEKAY

SEQ ID NO: 92766 - protein, 10 aa, Homo sapiens
  Table A; Target 92766; HLA-B*27:02; TUBA3C; ENSG00000198033; TAA
AREDLAALEK

SEQ ID NO: 92767 - protein, 10 aa, Homo sapiens
  Table A; Target 92767; HLA-B*27:05; TUBA3C; ENSG00000198033; TAA
AREDLAALEK

SEQ ID NO: 92768 - protein, 9 aa, Homo sapiens
  Table A; Target 92768; HLA-A*03:02; TUBA3C; ENSG00000198033; TAA
ARGHYTIGK

SEQ ID NO: 92769 - protein, 9 aa, Homo sapiens
  Table A; Target 92769; HLA-A*11:01; TUBA3C; ENSG00000198033; TAA
ARGHYTIGK

SEQ ID NO: 92770 - protein, 9 aa, Homo sapiens
  Table A; Target 92770; HLA-B*27:02; TUBA3C; ENSG00000198033; TAA
ARGHYTIGK

SEQ ID NO: 92771 - protein, 9 aa, Homo sapiens
  Table A; Target 92771; HLA-B*27:05; TUBA3C; ENSG00000198033; TAA
ARGHYTIGK

SEQ ID NO: 92772 - protein, 9 aa, Homo sapiens
  Table A; Target 92772; HLA-C*06:02; TUBA3C; ENSG00000198033; TAA
ARGHYTIGK

SEQ ID NO: 92773 - protein, 9 aa, Homo sapiens
  Table A; Target 92773; HLA-C*07:01; TUBA3C; ENSG00000198033; TAA
ARGHYTIGK

SEQ ID NO: 92774 - protein, 9 aa, Homo sapiens
  Table A; Target 92774; HLA-C*07:02; TUBA3C; ENSG00000198033; TAA
ARGHYTIGK

SEQ ID NO: 92775 - protein, 9 aa, Homo sapiens
  Table A; Target 92775; HLA-B*27:05; TUBA3C; ENSG00000198033; TAA
ARLDHKFDL

SEQ ID NO: 92776 - protein, 9 aa, Homo sapiens
  Table A; Target 92776; HLA-C*06:02; TUBA3C; ENSG00000198033; TAA
ARLDHKFDL

SEQ ID NO: 92777 - protein, 8 aa, Homo sapiens
  Table A; Target 92777; HLA-B*40:02; TUBA3C; ENSG00000198033; TAA
ASLLMERL

SEQ ID NO: 92778 - protein, 8 aa, Homo sapiens
  Table A; Target 92778; HLA-B*58:01; TUBA3C; ENSG00000198033; TAA
ASLLMERL

SEQ ID NO: 92779 - protein, 8 aa, Homo sapiens
  Table A; Target 92779; HLA-C*06:02; TUBA3C; ENSG00000198033; TAA
ASLLMERL

SEQ ID NO: 92780 - protein, 8 aa, Homo sapiens
  Table A; Target 92780; HLA-C*07:01; TUBA3C; ENSG00000198033; TAA
ASLLMERL

SEQ ID NO: 92781 - protein, 9 aa, Homo sapiens
  Table A; Target 92781; HLA-B*40:02; TUBA3C; ENSG00000198033; TAA
ASLRFDGAL

SEQ ID NO: 92782 - protein, 9 aa, Homo sapiens
  Table A; Target 92782; HLA-A*32:01; TUBA3C; ENSG00000198033; TAA
ATIKTKRTI

SEQ ID NO: 92783 - protein, 9 aa, Homo sapiens
  Table A; Target 92783; HLA-B*57:01; TUBA3C; ENSG00000198033; TAA
ATIKTKRTI

SEQ ID NO: 92784 - protein, 9 aa, Homo sapiens
  Table A; Target 92784; HLA-B*58:01; TUBA3C; ENSG00000198033; TAA
ATIKTKRTI

SEQ ID NO: 92785 - protein, 11 aa, Homo sapiens
  Table A; Target 92785; HLA-B*57:01; TUBA3C; ENSG00000198033; TAA
ATIKTKRTIQF

SEQ ID NO: 92786 - protein, 9 aa, Homo sapiens
  Table A; Target 92786; HLA-A*02:01; TUBA3C; ENSG00000198033; TAA
ATYAPVISA

SEQ ID NO: 92787 - protein, 9 aa, Homo sapiens
  Table A; Target 92787; HLA-A*02:03; TUBA3C; ENSG00000198033; TAA
ATYAPVISA

SEQ ID NO: 92788 - protein, 9 aa, Homo sapiens
  Table A; Target 92788; HLA-A*02:07; TUBA3C; ENSG00000198033; TAA
ATYAPVISA

SEQ ID NO: 92789 - protein, 9 aa, Homo sapiens
  Table A; Target 92789; HLA-A*03:01; TUBA3C; ENSG00000198033; TAA
ATYAPVISA

SEQ ID NO: 92790 - protein, 9 aa, Homo sapiens
  Table A; Target 92790; HLA-A*03:02; TUBA3C; ENSG00000198033; TAA
ATYAPVISA

SEQ ID NO: 92791 - protein, 9 aa, Homo sapiens
  Table A; Target 92791; HLA-A*11:01; TUBA3C; ENSG00000198033; TAA
ATYAPVISA

SEQ ID NO: 92792 - protein, 9 aa, Homo sapiens
  Table A; Target 92792; HLA-A*25:01; TUBA3C; ENSG00000198033; TAA
ATYAPVISA

SEQ ID NO: 92793 - protein, 9 aa, Homo sapiens
  Table A; Target 92793; HLA-A*30:01; TUBA3C; ENSG00000198033; TAA
ATYAPVISA

SEQ ID NO: 92794 - protein, 9 aa, Homo sapiens
  Table A; Target 92794; HLA-A*31:01; TUBA3C; ENSG00000198033; TAA
ATYAPVISA

SEQ ID NO: 92795 - protein, 9 aa, Homo sapiens
  Table A; Target 92795; HLA-A*32:01; TUBA3C; ENSG00000198033; TAA
ATYAPVISA

SEQ ID NO: 92796 - protein, 9 aa, Homo sapiens
  Table A; Target 92796; HLA-A*68:02; TUBA3C; ENSG00000198033; TAA
ATYAPVISA

SEQ ID NO: 92797 - protein, 9 aa, Homo sapiens
  Table A; Target 92797; HLA-B*13:02; TUBA3C; ENSG00000198033; TAA
ATYAPVISA

SEQ ID NO: 92798 - protein, 9 aa, Homo sapiens
  Table A; Target 92798; HLA-B*15:01; TUBA3C; ENSG00000198033; TAA
ATYAPVISA

SEQ ID NO: 92799 - protein, 9 aa, Homo sapiens
  Table A; Target 92799; HLA-B*27:05; TUBA3C; ENSG00000198033; TAA
ATYAPVISA

SEQ ID NO: 92800 - protein, 9 aa, Homo sapiens
  Table A; Target 92800; HLA-B*40:02; TUBA3C; ENSG00000198033; TAA
ATYAPVISA

SEQ ID NO: 92801 - protein, 9 aa, Homo sapiens
  Table A; Target 92801; HLA-B*46:01; TUBA3C; ENSG00000198033; TAA
ATYAPVISA

SEQ ID NO: 92802 - protein, 9 aa, Homo sapiens
  Table A; Target 92802; HLA-B*54:01; TUBA3C; ENSG00000198033; TAA
ATYAPVISA

SEQ ID NO: 92803 - protein, 9 aa, Homo sapiens
  Table A; Target 92803; HLA-B*55:01; TUBA3C; ENSG00000198033; TAA
ATYAPVISA

SEQ ID NO: 92804 - protein, 9 aa, Homo sapiens
  Table A; Target 92804; HLA-B*56:01; TUBA3C; ENSG00000198033; TAA
ATYAPVISA

SEQ ID NO: 92805 - protein, 9 aa, Homo sapiens
  Table A; Target 92805; HLA-B*58:01; TUBA3C; ENSG00000198033; TAA
ATYAPVISA

SEQ ID NO: 92806 - protein, 9 aa, Homo sapiens
  Table A; Target 92806; HLA-C*02:02; TUBA3C; ENSG00000198033; TAA
ATYAPVISA

SEQ ID NO: 92807 - protein, 9 aa, Homo sapiens
  Table A; Target 92807; HLA-C*03:03; TUBA3C; ENSG00000198033; TAA
ATYAPVISA

SEQ ID NO: 92808 - protein, 9 aa, Homo sapiens
  Table A; Target 92808; HLA-C*03:04; TUBA3C; ENSG00000198033; TAA
ATYAPVISA

SEQ ID NO: 92809 - protein, 9 aa, Homo sapiens
  Table A; Target 92809; HLA-C*06:02; TUBA3C; ENSG00000198033; TAA
ATYAPVISA

SEQ ID NO: 92810 - protein, 9 aa, Homo sapiens
  Table A; Target 92810; HLA-C*12:03; TUBA3C; ENSG00000198033; TAA
ATYAPVISA

SEQ ID NO: 92811 - protein, 9 aa, Homo sapiens
  Table A; Target 92811; HLA-C*16:04; TUBA3C; ENSG00000198033; TAA
ATYAPVISA

SEQ ID NO: 92812 - protein, 10 aa, Homo sapiens
  Table A; Target 92812; HLA-A*03:01; TUBA3C; ENSG00000198033; TAA
ATYAPVISAE

SEQ ID NO: 92813 - protein, 10 aa, Homo sapiens
  Table A; Target 92813; HLA-C*06:02; TUBA3C; ENSG00000198033; TAA
ATYAPVISAE

SEQ ID NO: 92814 - protein, 11 aa, Homo sapiens
  Table A; Target 92814; HLA-A*01:01; TUBA3C; ENSG00000198033; TAA
ATYAPVISAEK

SEQ ID NO: 92815 - protein, 11 aa, Homo sapiens
  Table A; Target 92815; HLA-A*02:03; TUBA3C; ENSG00000198033; TAA
ATYAPVISAEK

SEQ ID NO: 92816 - protein, 11 aa, Homo sapiens
  Table A; Target 92816; HLA-A*03:01; TUBA3C; ENSG00000198033; TAA
ATYAPVISAEK

SEQ ID NO: 92817 - protein, 11 aa, Homo sapiens
  Table A; Target 92817; HLA-A*03:02; TUBA3C; ENSG00000198033; TAA
ATYAPVISAEK

SEQ ID NO: 92818 - protein, 11 aa, Homo sapiens
  Table A; Target 92818; HLA-A*11:01; TUBA3C; ENSG00000198033; TAA
ATYAPVISAEK

SEQ ID NO: 92819 - protein, 11 aa, Homo sapiens
  Table A; Target 92819; HLA-A*29:02; TUBA3C; ENSG00000198033; TAA
ATYAPVISAEK

SEQ ID NO: 92820 - protein, 11 aa, Homo sapiens
  Table A; Target 92820; HLA-A*30:02; TUBA3C; ENSG00000198033; TAA
ATYAPVISAEK

SEQ ID NO: 92821 - protein, 11 aa, Homo sapiens
  Table A; Target 92821; HLA-A*31:01; TUBA3C; ENSG00000198033; TAA
ATYAPVISAEK

SEQ ID NO: 92822 - protein, 11 aa, Homo sapiens
  Table A; Target 92822; HLA-A*33:03; TUBA3C; ENSG00000198033; TAA
ATYAPVISAEK

SEQ ID NO: 92823 - protein, 11 aa, Homo sapiens
  Table A; Target 92823; HLA-A*68:01; TUBA3C; ENSG00000198033; TAA
ATYAPVISAEK

SEQ ID NO: 92824 - protein, 11 aa, Homo sapiens
  Table A; Target 92824; HLA-A*68:02; TUBA3C; ENSG00000198033; TAA
ATYAPVISAEK

SEQ ID NO: 92825 - protein, 11 aa, Homo sapiens
  Table A; Target 92825; HLA-B*27:02; TUBA3C; ENSG00000198033; TAA
ATYAPVISAEK

SEQ ID NO: 92826 - protein, 11 aa, Homo sapiens
  Table A; Target 92826; HLA-B*27:05; TUBA3C; ENSG00000198033; TAA
ATYAPVISAEK

SEQ ID NO: 92827 - protein, 11 aa, Homo sapiens
  Table A; Target 92827; HLA-B*57:01; TUBA3C; ENSG00000198033; TAA
ATYAPVISAEK

SEQ ID NO: 92828 - protein, 11 aa, Homo sapiens
  Table A; Target 92828; HLA-C*06:02; TUBA3C; ENSG00000198033; TAA
ATYAPVISAEK

SEQ ID NO: 92829 - protein, 11 aa, Homo sapiens
  Table A; Target 92829; HLA-C*07:06; TUBA3C; ENSG00000198033; TAA
ATYAPVISAEK

SEQ ID NO: 92830 - protein, 11 aa, Homo sapiens
  Table A; Target 92830; HLA-C*16:04; TUBA3C; ENSG00000198033; TAA
ATYAPVISAEK

SEQ ID NO: 92831 - protein, 9 aa, Homo sapiens
  Table A; Target 92831; HLA-C*07:01; TUBA3C; ENSG00000198033; TAA
AVCMLSNTT

SEQ ID NO: 92832 - protein, 10 aa, Homo sapiens
  Table A; Target 92832; HLA-A*02:01; TUBA3C; ENSG00000198033; TAA
AVFVDLEPTV

SEQ ID NO: 92833 - protein, 10 aa, Homo sapiens
  Table A; Target 92833; HLA-A*02:03; TUBA3C; ENSG00000198033; TAA
AVFVDLEPTV

SEQ ID NO: 92834 - protein, 10 aa, Homo sapiens
  Table A; Target 92834; HLA-A*02:04; TUBA3C; ENSG00000198033; TAA
AVFVDLEPTV

SEQ ID NO: 92835 - protein, 10 aa, Homo sapiens
  Table A; Target 92835; HLA-A*02:07; TUBA3C; ENSG00000198033; TAA
AVFVDLEPTV

SEQ ID NO: 92836 - protein, 10 aa, Homo sapiens
  Table A; Target 92836; HLA-B*13:02; TUBA3C; ENSG00000198033; TAA
AVFVDLEPTV

SEQ ID NO: 92837 - protein, 10 aa, Homo sapiens
  Table A; Target 92837; HLA-C*06:02; TUBA3C; ENSG00000198033; TAA
AVFVDLEPTV

SEQ ID NO: 92838 - protein, 11 aa, Homo sapiens
  Table A; Target 92838; HLA-A*02:01; TUBA3C; ENSG00000198033; TAA
AVFVDLEPTVV

SEQ ID NO: 92839 - protein, 11 aa, Homo sapiens
  Table A; Target 92839; HLA-A*02:03; TUBA3C; ENSG00000198033; TAA
AVFVDLEPTVV

SEQ ID NO: 92840 - protein, 11 aa, Homo sapiens
  Table A; Target 92840; HLA-A*68:02; TUBA3C; ENSG00000198033; TAA
AVFVDLEPTVV

SEQ ID NO: 92841 - protein, 11 aa, Homo sapiens
  Table A; Target 92841; HLA-B*13:02; TUBA3C; ENSG00000198033; TAA
AVFVDLEPTVV

SEQ ID NO: 92842 - protein, 11 aa, Homo sapiens
  Table A; Target 92842; HLA-B*55:01; TUBA3C; ENSG00000198033; TAA
AVFVDLEPTVV

SEQ ID NO: 92843 - protein, 9 aa, Homo sapiens
  Table A; Target 92843; HLA-A*02:01; TUBA3C; ENSG00000198033; TAA
AVVEPYNSI

SEQ ID NO: 92844 - protein, 9 aa, Homo sapiens
  Table A; Target 92844; HLA-A*02:03; TUBA3C; ENSG00000198033; TAA
AVVEPYNSI

SEQ ID NO: 92845 - protein, 9 aa, Homo sapiens
  Table A; Target 92845; HLA-A*02:07; TUBA3C; ENSG00000198033; TAA
AVVEPYNSI

SEQ ID NO: 92846 - protein, 9 aa, Homo sapiens
  Table A; Target 92846; HLA-A*23:01; TUBA3C; ENSG00000198033; TAA
AVVEPYNSI

SEQ ID NO: 92847 - protein, 9 aa, Homo sapiens
  Table A; Target 92847; HLA-A*24:02; TUBA3C; ENSG00000198033; TAA
AVVEPYNSI

SEQ ID NO: 92848 - protein, 9 aa, Homo sapiens
  Table A; Target 92848; HLA-A*25:01; TUBA3C; ENSG00000198033; TAA
AVVEPYNSI

SEQ ID NO: 92849 - protein, 9 aa, Homo sapiens
  Table A; Target 92849; HLA-A*26:01; TUBA3C; ENSG00000198033; TAA
AVVEPYNSI

SEQ ID NO: 92850 - protein, 9 aa, Homo sapiens
  Table A; Target 92850; HLA-A*30:01; TUBA3C; ENSG00000198033; TAA
AVVEPYNSI

SEQ ID NO: 92851 - protein, 9 aa, Homo sapiens
  Table A; Target 92851; HLA-A*32:01; TUBA3C; ENSG00000198033; TAA
AVVEPYNSI

SEQ ID NO: 92852 - protein, 9 aa, Homo sapiens
  Table A; Target 92852; HLA-A*68:02; TUBA3C; ENSG00000198033; TAA
AVVEPYNSI

SEQ ID NO: 92853 - protein, 9 aa, Homo sapiens
  Table A; Target 92853; HLA-B*07:02; TUBA3C; ENSG00000198033; TAA
AVVEPYNSI

SEQ ID NO: 92854 - protein, 9 aa, Homo sapiens
  Table A; Target 92854; HLA-B*13:02; TUBA3C; ENSG00000198033; TAA
AVVEPYNSI

SEQ ID NO: 92855 - protein, 9 aa, Homo sapiens
  Table A; Target 92855; HLA-B*15:01; TUBA3C; ENSG00000198033; TAA
AVVEPYNSI

SEQ ID NO: 92856 - protein, 9 aa, Homo sapiens
  Table A; Target 92856; HLA-B*15:03; TUBA3C; ENSG00000198033; TAA
AVVEPYNSI

SEQ ID NO: 92857 - protein, 9 aa, Homo sapiens
  Table A; Target 92857; HLA-B*27:05; TUBA3C; ENSG00000198033; TAA
AVVEPYNSI

SEQ ID NO: 92858 - protein, 9 aa, Homo sapiens
  Table A; Target 92858; HLA-B*35:03; TUBA3C; ENSG00000198033; TAA
AVVEPYNSI

SEQ ID NO: 92859 - protein, 9 aa, Homo sapiens
  Table A; Target 92859; HLA-B*38:01; TUBA3C; ENSG00000198033; TAA
AVVEPYNSI

SEQ ID NO: 92860 - protein, 9 aa, Homo sapiens
  Table A; Target 92860; HLA-B*39:01; TUBA3C; ENSG00000198033; TAA
AVVEPYNSI

SEQ ID NO: 92861 - protein, 9 aa, Homo sapiens
  Table A; Target 92861; HLA-B*40:02; TUBA3C; ENSG00000198033; TAA
AVVEPYNSI

SEQ ID NO: 92862 - protein, 9 aa, Homo sapiens
  Table A; Target 92862; HLA-B*44:03; TUBA3C; ENSG00000198033; TAA
AVVEPYNSI

SEQ ID NO: 92863 - protein, 9 aa, Homo sapiens
  Table A; Target 92863; HLA-B*46:01; TUBA3C; ENSG00000198033; TAA
AVVEPYNSI

SEQ ID NO: 92864 - protein, 9 aa, Homo sapiens
  Table A; Target 92864; HLA-B*49:01; TUBA3C; ENSG00000198033; TAA
AVVEPYNSI

SEQ ID NO: 92865 - protein, 9 aa, Homo sapiens
  Table A; Target 92865; HLA-B*51:01; TUBA3C; ENSG00000198033; TAA
AVVEPYNSI

SEQ ID NO: 92866 - protein, 9 aa, Homo sapiens
  Table A; Target 92866; HLA-B*54:01; TUBA3C; ENSG00000198033; TAA
AVVEPYNSI

SEQ ID NO: 92867 - protein, 9 aa, Homo sapiens
  Table A; Target 92867; HLA-B*55:01; TUBA3C; ENSG00000198033; TAA
AVVEPYNSI

SEQ ID NO: 92868 - protein, 9 aa, Homo sapiens
  Table A; Target 92868; HLA-B*56:01; TUBA3C; ENSG00000198033; TAA
AVVEPYNSI

SEQ ID NO: 92869 - protein, 9 aa, Homo sapiens
  Table A; Target 92869; HLA-B*57:01; TUBA3C; ENSG00000198033; TAA
AVVEPYNSI

SEQ ID NO: 92870 - protein, 9 aa, Homo sapiens
  Table A; Target 92870; HLA-B*58:01; TUBA3C; ENSG00000198033; TAA
AVVEPYNSI

SEQ ID NO: 92871 - protein, 9 aa, Homo sapiens
  Table A; Target 92871; HLA-C*01:02; TUBA3C; ENSG00000198033; TAA
AVVEPYNSI

SEQ ID NO: 92872 - protein, 9 aa, Homo sapiens
  Table A; Target 92872; HLA-C*02:02; TUBA3C; ENSG00000198033; TAA
AVVEPYNSI

SEQ ID NO: 92873 - protein, 9 aa, Homo sapiens
  Table A; Target 92873; HLA-C*03:03; TUBA3C; ENSG00000198033; TAA
AVVEPYNSI

SEQ ID NO: 92874 - protein, 9 aa, Homo sapiens
  Table A; Target 92874; HLA-C*03:04; TUBA3C; ENSG00000198033; TAA
AVVEPYNSI

SEQ ID NO: 92875 - protein, 9 aa, Homo sapiens
  Table A; Target 92875; HLA-C*05:01; TUBA3C; ENSG00000198033; TAA
AVVEPYNSI

SEQ ID NO: 92876 - protein, 9 aa, Homo sapiens
  Table A; Target 92876; HLA-C*06:02; TUBA3C; ENSG00000198033; TAA
AVVEPYNSI

SEQ ID NO: 92877 - protein, 9 aa, Homo sapiens
  Table A; Target 92877; HLA-C*07:02; TUBA3C; ENSG00000198033; TAA
AVVEPYNSI

SEQ ID NO: 92878 - protein, 9 aa, Homo sapiens
  Table A; Target 92878; HLA-C*07:06; TUBA3C; ENSG00000198033; TAA
AVVEPYNSI

SEQ ID NO: 92879 - protein, 9 aa, Homo sapiens
  Table A; Target 92879; HLA-C*12:03; TUBA3C; ENSG00000198033; TAA
AVVEPYNSI

SEQ ID NO: 92880 - protein, 9 aa, Homo sapiens
  Table A; Target 92880; HLA-C*14:02; TUBA3C; ENSG00000198033; TAA
AVVEPYNSI

SEQ ID NO: 92881 - protein, 9 aa, Homo sapiens
  Table A; Target 92881; HLA-C*16:02; TUBA3C; ENSG00000198033; TAA
AVVEPYNSI

SEQ ID NO: 92882 - protein, 9 aa, Homo sapiens
  Table A; Target 92882; HLA-C*16:04; TUBA3C; ENSG00000198033; TAA
AVVEPYNSI

SEQ ID NO: 92883 - protein, 10 aa, Homo sapiens
  Table A; Target 92883; HLA-A*02:07; TUBA3C; ENSG00000198033; TAA
AVVEPYNSIL

SEQ ID NO: 92884 - protein, 10 aa, Homo sapiens
  Table A; Target 92884; HLA-A*25:01; TUBA3C; ENSG00000198033; TAA
AVVEPYNSIL

SEQ ID NO: 92885 - protein, 10 aa, Homo sapiens
  Table A; Target 92885; HLA-A*26:01; TUBA3C; ENSG00000198033; TAA
AVVEPYNSIL

SEQ ID NO: 92886 - protein, 10 aa, Homo sapiens
  Table A; Target 92886; HLA-A*32:01; TUBA3C; ENSG00000198033; TAA
AVVEPYNSIL

SEQ ID NO: 92887 - protein, 10 aa, Homo sapiens
  Table A; Target 92887; HLA-A*68:02; TUBA3C; ENSG00000198033; TAA
AVVEPYNSIL

SEQ ID NO: 92888 - protein, 10 aa, Homo sapiens
  Table A; Target 92888; HLA-B*07:02; TUBA3C; ENSG00000198033; TAA
AVVEPYNSIL

SEQ ID NO: 92889 - protein, 10 aa, Homo sapiens
  Table A; Target 92889; HLA-B*15:01; TUBA3C; ENSG00000198033; TAA
AVVEPYNSIL

SEQ ID NO: 92890 - protein, 10 aa, Homo sapiens
  Table A; Target 92890; HLA-B*27:05; TUBA3C; ENSG00000198033; TAA
AVVEPYNSIL

SEQ ID NO: 92891 - protein, 10 aa, Homo sapiens
  Table A; Target 92891; HLA-B*35:03; TUBA3C; ENSG00000198033; TAA
AVVEPYNSIL

SEQ ID NO: 92892 - protein, 10 aa, Homo sapiens
  Table A; Target 92892; HLA-B*40:01; TUBA3C; ENSG00000198033; TAA
AVVEPYNSIL

SEQ ID NO: 92893 - protein, 10 aa, Homo sapiens
  Table A; Target 92893; HLA-B*40:02; TUBA3C; ENSG00000198033; TAA
AVVEPYNSIL

SEQ ID NO: 92894 - protein, 10 aa, Homo sapiens
  Table A; Target 92894; HLA-B*58:01; TUBA3C; ENSG00000198033; TAA
AVVEPYNSIL

SEQ ID NO: 92895 - protein, 10 aa, Homo sapiens
  Table A; Target 92895; HLA-C*01:02; TUBA3C; ENSG00000198033; TAA
AVVEPYNSIL

SEQ ID NO: 92896 - protein, 10 aa, Homo sapiens
  Table A; Target 92896; HLA-C*02:02; TUBA3C; ENSG00000198033; TAA
AVVEPYNSIL

SEQ ID NO: 92897 - protein, 10 aa, Homo sapiens
  Table A; Target 92897; HLA-C*03:03; TUBA3C; ENSG00000198033; TAA
AVVEPYNSIL

SEQ ID NO: 92898 - protein, 10 aa, Homo sapiens
  Table A; Target 92898; HLA-C*03:04; TUBA3C; ENSG00000198033; TAA
AVVEPYNSIL

SEQ ID NO: 92899 - protein, 10 aa, Homo sapiens
  Table A; Target 92899; HLA-C*05:01; TUBA3C; ENSG00000198033; TAA
AVVEPYNSIL

SEQ ID NO: 92900 - protein, 10 aa, Homo sapiens
  Table A; Target 92900; HLA-C*07:02; TUBA3C; ENSG00000198033; TAA
AVVEPYNSIL

SEQ ID NO: 92901 - protein, 10 aa, Homo sapiens
  Table A; Target 92901; HLA-C*07:04; TUBA3C; ENSG00000198033; TAA
AVVEPYNSIL

SEQ ID NO: 92902 - protein, 10 aa, Homo sapiens
  Table A; Target 92902; HLA-C*12:03; TUBA3C; ENSG00000198033; TAA
AVVEPYNSIL

SEQ ID NO: 92903 - protein, 10 aa, Homo sapiens
  Table A; Target 92903; HLA-C*14:02; TUBA3C; ENSG00000198033; TAA
AVVEPYNSIL

SEQ ID NO: 92904 - protein, 10 aa, Homo sapiens
  Table A; Target 92904; HLA-C*16:02; TUBA3C; ENSG00000198033; TAA
AVVEPYNSIL

SEQ ID NO: 92905 - protein, 9 aa, Homo sapiens
  Table A; Target 92905; HLA-A*24:02; TUBA3C; ENSG00000198033; TAA
AWARLDHKF

SEQ ID NO: 92906 - protein, 8 aa, Homo sapiens
  Table A; Target 92906; HLA-C*01:02; TUBA3C; ENSG00000198033; TAA
AYHEQLSV

SEQ ID NO: 92907 - protein, 8 aa, Homo sapiens
  Table A; Target 92907; HLA-C*06:02; TUBA3C; ENSG00000198033; TAA
AYHEQLSV

SEQ ID NO: 92908 - protein, 8 aa, Homo sapiens
  Table A; Target 92908; HLA-C*07:01; TUBA3C; ENSG00000198033; TAA
AYHEQLSV

SEQ ID NO: 92909 - protein, 8 aa, Homo sapiens
  Table A; Target 92909; HLA-C*14:02; TUBA3C; ENSG00000198033; TAA
AYHEQLSV

SEQ ID NO: 92910 - protein, 9 aa, Homo sapiens
  Table A; Target 92910; HLA-B*40:02; TUBA3C; ENSG00000198033; TAA
AYHEQLSVA

SEQ ID NO: 92911 - protein, 9 aa, Homo sapiens
  Table A; Target 92911; HLA-B*54:01; TUBA3C; ENSG00000198033; TAA
AYHEQLSVA

SEQ ID NO: 92912 - protein, 9 aa, Homo sapiens
  Table A; Target 92912; HLA-B*55:01; TUBA3C; ENSG00000198033; TAA
AYHEQLSVA

SEQ ID NO: 92913 - protein, 9 aa, Homo sapiens
  Table A; Target 92913; HLA-C*01:02; TUBA3C; ENSG00000198033; TAA
AYHEQLSVA

SEQ ID NO: 92914 - protein, 9 aa, Homo sapiens
  Table A; Target 92914; HLA-C*04:01; TUBA3C; ENSG00000198033; TAA
AYHEQLSVA

SEQ ID NO: 92915 - protein, 9 aa, Homo sapiens
  Table A; Target 92915; HLA-C*06:02; TUBA3C; ENSG00000198033; TAA
AYHEQLSVA

SEQ ID NO: 92916 - protein, 9 aa, Homo sapiens
  Table A; Target 92916; HLA-C*07:01; TUBA3C; ENSG00000198033; TAA
AYHEQLSVA

SEQ ID NO: 92917 - protein, 9 aa, Homo sapiens
  Table A; Target 92917; HLA-C*12:03; TUBA3C; ENSG00000198033; TAA
AYHEQLSVA

SEQ ID NO: 92918 - protein, 9 aa, Homo sapiens
  Table A; Target 92918; HLA-C*14:02; TUBA3C; ENSG00000198033; TAA
AYHEQLSVA

SEQ ID NO: 92919 - protein, 9 aa, Homo sapiens
  Table A; Target 92919; HLA-C*16:02; TUBA3C; ENSG00000198033; TAA
AYHEQLSVA

SEQ ID NO: 92920 - protein, 11 aa, Homo sapiens
  Table A; Target 92920; HLA-A*24:02; TUBA3C; ENSG00000198033; TAA
AYHEQLSVAEI

SEQ ID NO: 92921 - protein, 9 aa, Homo sapiens
  Table A; Target 92921; HLA-B*54:01; TUBA3C; ENSG00000198033; TAA
CAFMVDNEA

SEQ ID NO: 92922 - protein, 9 aa, Homo sapiens
  Table A; Target 92922; HLA-B*56:01; TUBA3C; ENSG00000198033; TAA
CAFMVDNEA

SEQ ID NO: 92923 - protein, 10 aa, Homo sapiens
  Table A; Target 92923; HLA-C*07:01; TUBA3C; ENSG00000198033; TAA
CAFMVDNEAI

SEQ ID NO: 92924 - protein, 8 aa, Homo sapiens
  Table A; Target 92924; HLA-C*07:01; TUBA3C; ENSG00000198033; TAA
CDPRHGKY

SEQ ID NO: 92925 - protein, 8 aa, Homo sapiens
  Table A; Target 92925; HLA-C*01:02; TUBA3C; ENSG00000198033; TAA
CFEPANQM

SEQ ID NO: 92926 - protein, 8 aa, Homo sapiens
  Table A; Target 92926; HLA-C*04:01; TUBA3C; ENSG00000198033; TAA
CFEPANQM

SEQ ID NO: 92927 - protein, 8 aa, Homo sapiens
  Table A; Target 92927; HLA-C*07:01; TUBA3C; ENSG00000198033; TAA
CFEPANQM

SEQ ID NO: 92928 - protein, 8 aa, Homo sapiens
  Table A; Target 92928; HLA-C*14:02; TUBA3C; ENSG00000198033; TAA
CFEPANQM

SEQ ID NO: 92929 - protein, 8 aa, Homo sapiens
  Table A; Target 92929; HLA-C*16:02; TUBA3C; ENSG00000198033; TAA
CFEPANQM

SEQ ID NO: 92930 - protein, 9 aa, Homo sapiens
  Table A; Target 92930; HLA-C*04:01; TUBA3C; ENSG00000198033; TAA
CFEPANQMV

SEQ ID NO: 92931 - protein, 10 aa, Homo sapiens
  Table A; Target 92931; HLA-C*07:01; TUBA3C; ENSG00000198033; TAA
CFEPANQMVK

SEQ ID NO: 92932 - protein, 9 aa, Homo sapiens
  Table A; Target 92932; HLA-A*02:03; TUBA3C; ENSG00000198033; TAA
CISIHVGQA

SEQ ID NO: 92933 - protein, 9 aa, Homo sapiens
  Table A; Target 92933; HLA-A*02:01; TUBA3C; ENSG00000198033; TAA
CMLSNTTAI

SEQ ID NO: 92934 - protein, 9 aa, Homo sapiens
  Table A; Target 92934; HLA-A*02:03; TUBA3C; ENSG00000198033; TAA
CMLSNTTAI

SEQ ID NO: 92935 - protein, 9 aa, Homo sapiens
  Table A; Target 92935; HLA-A*02:04; TUBA3C; ENSG00000198033; TAA
CMLSNTTAI

SEQ ID NO: 92936 - protein, 9 aa, Homo sapiens
  Table A; Target 92936; HLA-A*23:01; TUBA3C; ENSG00000198033; TAA
CMLSNTTAI

SEQ ID NO: 92937 - protein, 9 aa, Homo sapiens
  Table A; Target 92937; HLA-A*24:02; TUBA3C; ENSG00000198033; TAA
CMLSNTTAI

SEQ ID NO: 92938 - protein, 9 aa, Homo sapiens
  Table A; Target 92938; HLA-B*13:02; TUBA3C; ENSG00000198033; TAA
CMLSNTTAI

SEQ ID NO: 92939 - protein, 9 aa, Homo sapiens
  Table A; Target 92939; HLA-B*40:02; TUBA3C; ENSG00000198033; TAA
CMLSNTTAI

SEQ ID NO: 92940 - protein, 9 aa, Homo sapiens
  Table A; Target 92940; HLA-B*46:01; TUBA3C; ENSG00000198033; TAA
CMLSNTTAI

SEQ ID NO: 92941 - protein, 9 aa, Homo sapiens
  Table A; Target 92941; HLA-B*49:01; TUBA3C; ENSG00000198033; TAA
CMLSNTTAI

SEQ ID NO: 92942 - protein, 9 aa, Homo sapiens
  Table A; Target 92942; HLA-B*55:01; TUBA3C; ENSG00000198033; TAA
CMLSNTTAI

SEQ ID NO: 92943 - protein, 9 aa, Homo sapiens
  Table A; Target 92943; HLA-C*01:02; TUBA3C; ENSG00000198033; TAA
CMLSNTTAI

SEQ ID NO: 92944 - protein, 9 aa, Homo sapiens
  Table A; Target 92944; HLA-C*04:01; TUBA3C; ENSG00000198033; TAA
CMLSNTTAI

SEQ ID NO: 92945 - protein, 9 aa, Homo sapiens
  Table A; Target 92945; HLA-C*07:01; TUBA3C; ENSG00000198033; TAA
CMLSNTTAI

SEQ ID NO: 92946 - protein, 9 aa, Homo sapiens
  Table A; Target 92946; HLA-C*14:02; TUBA3C; ENSG00000198033; TAA
CMLSNTTAI

SEQ ID NO: 92947 - protein, 9 aa, Homo sapiens
  Table A; Target 92947; HLA-A*68:02; TUBA3C; ENSG00000198033; TAA
CPTGFKVGI

SEQ ID NO: 92948 - protein, 9 aa, Homo sapiens
  Table A; Target 92948; HLA-B*07:02; TUBA3C; ENSG00000198033; TAA
CPTGFKVGI

SEQ ID NO: 92949 - protein, 9 aa, Homo sapiens
  Table A; Target 92949; HLA-B*08:01; TUBA3C; ENSG00000198033; TAA
CPTGFKVGI

SEQ ID NO: 92950 - protein, 9 aa, Homo sapiens
  Table A; Target 92950; HLA-B*13:02; TUBA3C; ENSG00000198033; TAA
CPTGFKVGI

SEQ ID NO: 92951 - protein, 9 aa, Homo sapiens
  Table A; Target 92951; HLA-B*35:03; TUBA3C; ENSG00000198033; TAA
CPTGFKVGI

SEQ ID NO: 92952 - protein, 9 aa, Homo sapiens
  Table A; Target 92952; HLA-B*51:01; TUBA3C; ENSG00000198033; TAA
CPTGFKVGI

SEQ ID NO: 92953 - protein, 9 aa, Homo sapiens
  Table A; Target 92953; HLA-B*54:01; TUBA3C; ENSG00000198033; TAA
CPTGFKVGI

SEQ ID NO: 92954 - protein, 9 aa, Homo sapiens
  Table A; Target 92954; HLA-B*55:01; TUBA3C; ENSG00000198033; TAA
CPTGFKVGI

SEQ ID NO: 92955 - protein, 9 aa, Homo sapiens
  Table A; Target 92955; HLA-B*56:01; TUBA3C; ENSG00000198033; TAA
CPTGFKVGI

SEQ ID NO: 92956 - protein, 9 aa, Homo sapiens
  Table A; Target 92956; HLA-C*04:01; TUBA3C; ENSG00000198033; TAA
CPTGFKVGI

SEQ ID NO: 92957 - protein, 9 aa, Homo sapiens
  Table A; Target 92957; HLA-C*06:02; TUBA3C; ENSG00000198033; TAA
CPTGFKVGI

SEQ ID NO: 92958 - protein, 9 aa, Homo sapiens
  Table A; Target 92958; HLA-C*07:01; TUBA3C; ENSG00000198033; TAA
CPTGFKVGI

SEQ ID NO: 92959 - protein, 9 aa, Homo sapiens
  Table A; Target 92959; HLA-C*07:02; TUBA3C; ENSG00000198033; TAA
CPTGFKVGI

SEQ ID NO: 92960 - protein, 9 aa, Homo sapiens
  Table A; Target 92960; HLA-C*16:02; TUBA3C; ENSG00000198033; TAA
CPTGFKVGI

SEQ ID NO: 92961 - protein, 8 aa, Homo sapiens
  Table A; Target 92961; HLA-A*33:01; TUBA3C; ENSG00000198033; TAA
DAANNYAR

SEQ ID NO: 92962 - protein, 8 aa, Homo sapiens
  Table A; Target 92962; HLA-A*33:03; TUBA3C; ENSG00000198033; TAA
DAANNYAR

SEQ ID NO: 92963 - protein, 8 aa, Homo sapiens
  Table A; Target 92963; HLA-A*68:01; TUBA3C; ENSG00000198033; TAA
DAANNYAR

SEQ ID NO: 92964 - protein, 8 aa, Homo sapiens
  Table A; Target 92964; HLA-B*27:02; TUBA3C; ENSG00000198033; TAA
DAANNYAR

SEQ ID NO: 92965 - protein, 8 aa, Homo sapiens
  Table A; Target 92965; HLA-B*27:05; TUBA3C; ENSG00000198033; TAA
DAANNYAR

SEQ ID NO: 92966 - protein, 8 aa, Homo sapiens
  Table A; Target 92966; HLA-B*35:01; TUBA3C; ENSG00000198033; TAA
DAANNYAR

SEQ ID NO: 92967 - protein, 8 aa, Homo sapiens
  Table A; Target 92967; HLA-C*07:06; TUBA3C; ENSG00000198033; TAA
DAANNYAR

SEQ ID NO: 92968 - protein, 9 aa, Homo sapiens
  Table A; Target 92968; HLA-A*26:01; TUBA3C; ENSG00000198033; TAA
DAANNYARG

SEQ ID NO: 92969 - protein, 9 aa, Homo sapiens
  Table A; Target 92969; HLA-A*33:01; TUBA3C; ENSG00000198033; TAA
DAANNYARG

SEQ ID NO: 92970 - protein, 11 aa, Homo sapiens
  Table A; Target 92970; HLA-A*01:01; TUBA3C; ENSG00000198033; TAA
DAANNYARGHY

SEQ ID NO: 92971 - protein, 11 aa, Homo sapiens
  Table A; Target 92971; HLA-A*26:01; TUBA3C; ENSG00000198033; TAA
DAANNYARGHY

SEQ ID NO: 92972 - protein, 8 aa, Homo sapiens
  Table A; Target 92972; HLA-B*18:01; TUBA3C; ENSG00000198033; TAA
DDSFNTFF

SEQ ID NO: 92973 - protein, 8 aa, Homo sapiens
  Table A; Target 92973; HLA-B*37:01; TUBA3C; ENSG00000198033; TAA
DDSFNTFF

SEQ ID NO: 92974 - protein, 8 aa, Homo sapiens
  Table A; Target 92974; HLA-C*04:01; TUBA3C; ENSG00000198033; TAA
DDSFNTFF

SEQ ID NO: 92975 - protein, 8 aa, Homo sapiens
  Table A; Target 92975; HLA-C*07:01; TUBA3C; ENSG00000198033; TAA
DDSFNTFF

SEQ ID NO: 92976 - protein, 8 aa, Homo sapiens
  Table A; Target 92976; HLA-A*25:01; TUBA3C; ENSG00000198033; TAA
DEVRTGTY

SEQ ID NO: 92977 - protein, 8 aa, Homo sapiens
  Table A; Target 92977; HLA-A*26:01; TUBA3C; ENSG00000198033; TAA
DEVRTGTY

SEQ ID NO: 92978 - protein, 8 aa, Homo sapiens
  Table A; Target 92978; HLA-B*15:03; TUBA3C; ENSG00000198033; TAA
DEVRTGTY

SEQ ID NO: 92979 - protein, 8 aa, Homo sapiens
  Table A; Target 92979; HLA-B*18:01; TUBA3C; ENSG00000198033; TAA
DEVRTGTY

SEQ ID NO: 92980 - protein, 8 aa, Homo sapiens
  Table A; Target 92980; HLA-B*35:01; TUBA3C; ENSG00000198033; TAA
DEVRTGTY

SEQ ID NO: 92981 - protein, 8 aa, Homo sapiens
  Table A; Target 92981; HLA-B*39:01; TUBA3C; ENSG00000198033; TAA
DEVRTGTY

SEQ ID NO: 92982 - protein, 8 aa, Homo sapiens
  Table A; Target 92982; HLA-B*40:02; TUBA3C; ENSG00000198033; TAA
DEVRTGTY

SEQ ID NO: 92983 - protein, 8 aa, Homo sapiens
  Table A; Target 92983; HLA-B*44:02; TUBA3C; ENSG00000198033; TAA
DEVRTGTY

SEQ ID NO: 92984 - protein, 8 aa, Homo sapiens
  Table A; Target 92984; HLA-B*44:03; TUBA3C; ENSG00000198033; TAA
DEVRTGTY

SEQ ID NO: 92985 - protein, 8 aa, Homo sapiens
  Table A; Target 92985; HLA-B*49:01; TUBA3C; ENSG00000198033; TAA
DEVRTGTY

SEQ ID NO: 92986 - protein, 8 aa, Homo sapiens
  Table A; Target 92986; HLA-B*51:01; TUBA3C; ENSG00000198033; TAA
DEVRTGTY

SEQ ID NO: 92987 - protein, 8 aa, Homo sapiens
  Table A; Target 92987; HLA-C*03:03; TUBA3C; ENSG00000198033; TAA
DEVRTGTY

SEQ ID NO: 92988 - protein, 8 aa, Homo sapiens
  Table A; Target 92988; HLA-C*04:01; TUBA3C; ENSG00000198033; TAA
DEVRTGTY

SEQ ID NO: 92989 - protein, 8 aa, Homo sapiens
  Table A; Target 92989; HLA-C*07:01; TUBA3C; ENSG00000198033; TAA
DEVRTGTY

SEQ ID NO: 92990 - protein, 8 aa, Homo sapiens
  Table A; Target 92990; HLA-C*12:03; TUBA3C; ENSG00000198033; TAA
DEVRTGTY

SEQ ID NO: 92991 - protein, 8 aa, Homo sapiens
  Table A; Target 92991; HLA-C*16:02; TUBA3C; ENSG00000198033; TAA
DEVRTGTY

SEQ ID NO: 92992 - protein, 8 aa, Homo sapiens
  Table A; Target 92992; HLA-C*16:04; TUBA3C; ENSG00000198033; TAA
DEVRTGTY

SEQ ID NO: 92993 - protein, 9 aa, Homo sapiens
  Table A; Target 92993; HLA-A*33:01; TUBA3C; ENSG00000198033; TAA
DEVRTGTYR

SEQ ID NO: 92994 - protein, 9 aa, Homo sapiens
  Table A; Target 92994; HLA-A*33:03; TUBA3C; ENSG00000198033; TAA
DEVRTGTYR

SEQ ID NO: 92995 - protein, 9 aa, Homo sapiens
  Table A; Target 92995; HLA-A*68:01; TUBA3C; ENSG00000198033; TAA
DEVRTGTYR

SEQ ID NO: 92996 - protein, 9 aa, Homo sapiens
  Table A; Target 92996; HLA-B*18:01; TUBA3C; ENSG00000198033; TAA
DEVRTGTYR

SEQ ID NO: 92997 - protein, 8 aa, Homo sapiens
  Table A; Target 92997; HLA-B*35:03; TUBA3C; ENSG00000198033; TAA
DGALNVDL

SEQ ID NO: 92998 - protein, 11 aa, Homo sapiens
  Table A; Target 92998; HLA-B*27:02; TUBA3C; ENSG00000198033; TAA
DGALNVDLTEF

SEQ ID NO: 92999 - protein, 11 aa, Homo sapiens
  Table A; Target 92999; HLA-B*35:01; TUBA3C; ENSG00000198033; TAA
DGALNVDLTEF

SEQ ID NO: 93000 - protein, 11 aa, Homo sapiens
  Table A; Target 93000; HLA-C*07:01; TUBA3C; ENSG00000198033; TAA
DGALNVDLTEF

SEQ ID NO: 93001 - protein, 8 aa, Homo sapiens
  Table A; Target 93001; HLA-C*07:01; TUBA3C; ENSG00000198033; TAA
DHKFDLMY

SEQ ID NO: 93002 - protein, 9 aa, Homo sapiens
  Table A; Target 93002; HLA-A*33:01; TUBA3C; ENSG00000198033; TAA
DIERPTYTN

SEQ ID NO: 93003 - protein, 9 aa, Homo sapiens
  Table A; Target 93003; HLA-C*07:01; TUBA3C; ENSG00000198033; TAA
DIERPTYTN

SEQ ID NO: 93004 - protein, 10 aa, Homo sapiens
  Table A; Target 93004; HLA-A*33:01; TUBA3C; ENSG00000198033; TAA
DIERPTYTNL

SEQ ID NO: 93005 - protein, 10 aa, Homo sapiens
  Table A; Target 93005; HLA-A*68:01; TUBA3C; ENSG00000198033; TAA
DIERPTYTNL

SEQ ID NO: 93006 - protein, 10 aa, Homo sapiens
  Table A; Target 93006; HLA-A*68:02; TUBA3C; ENSG00000198033; TAA
DIERPTYTNL

SEQ ID NO: 93007 - protein, 10 aa, Homo sapiens
  Table A; Target 93007; HLA-B*38:01; TUBA3C; ENSG00000198033; TAA
DIERPTYTNL

SEQ ID NO: 93008 - protein, 10 aa, Homo sapiens
  Table A; Target 93008; HLA-C*01:02; TUBA3C; ENSG00000198033; TAA
DIERPTYTNL

SEQ ID NO: 93009 - protein, 10 aa, Homo sapiens
  Table A; Target 93009; HLA-C*05:01; TUBA3C; ENSG00000198033; TAA
DIERPTYTNL

SEQ ID NO: 93010 - protein, 10 aa, Homo sapiens
  Table A; Target 93010; HLA-C*07:01; TUBA3C; ENSG00000198033; TAA
DIERPTYTNL

SEQ ID NO: 93011 - protein, 10 aa, Homo sapiens
  Table A; Target 93011; HLA-C*07:02; TUBA3C; ENSG00000198033; TAA
DIERPTYTNL

SEQ ID NO: 93012 - protein, 10 aa, Homo sapiens
  Table A; Target 93012; HLA-C*07:06; TUBA3C; ENSG00000198033; TAA
DIERPTYTNL

SEQ ID NO: 93013 - protein, 11 aa, Homo sapiens
  Table A; Target 93013; HLA-A*01:01; TUBA3C; ENSG00000198033; TAA
DIERPTYTNLN

SEQ ID NO: 93014 - protein, 11 aa, Homo sapiens
  Table A; Target 93014; HLA-B*38:01; TUBA3C; ENSG00000198033; TAA
DKTIGGGDDSF

SEQ ID NO: 93015 - protein, 11 aa, Homo sapiens
  Table A; Target 93015; HLA-C*07:01; TUBA3C; ENSG00000198033; TAA
DKTIGGGDDSF

SEQ ID NO: 93016 - protein, 9 aa, Homo sapiens
  Table A; Target 93016; HLA-A*26:01; TUBA3C; ENSG00000198033; TAA
DLAALEKDY

SEQ ID NO: 93017 - protein, 9 aa, Homo sapiens
  Table A; Target 93017; HLA-B*44:03; TUBA3C; ENSG00000198033; TAA
DLAALEKDY

SEQ ID NO: 93018 - protein, 9 aa, Homo sapiens
  Table A; Target 93018; HLA-C*03:03; TUBA3C; ENSG00000198033; TAA
DLAALEKDY

SEQ ID NO: 93019 - protein, 9 aa, Homo sapiens
  Table A; Target 93019; HLA-C*07:01; TUBA3C; ENSG00000198033; TAA
DLAALEKDY

SEQ ID NO: 93020 - protein, 9 aa, Homo sapiens
  Table A; Target 93020; HLA-A*02:03; TUBA3C; ENSG00000198033; TAA
DLAKVQRAV

SEQ ID NO: 93021 - protein, 9 aa, Homo sapiens
  Table A; Target 93021; HLA-A*30:01; TUBA3C; ENSG00000198033; TAA
DLAKVQRAV

SEQ ID NO: 93022 - protein, 9 aa, Homo sapiens
  Table A; Target 93022; HLA-A*68:02; TUBA3C; ENSG00000198033; TAA
DLAKVQRAV

SEQ ID NO: 93023 - protein, 9 aa, Homo sapiens
  Table A; Target 93023; HLA-B*08:01; TUBA3C; ENSG00000198033; TAA
DLAKVQRAV

SEQ ID NO: 93024 - protein, 9 aa, Homo sapiens
  Table A; Target 93024; HLA-B*13:02; TUBA3C; ENSG00000198033; TAA
DLAKVQRAV

SEQ ID NO: 93025 - protein, 9 aa, Homo sapiens
  Table A; Target 93025; HLA-B*51:01; TUBA3C; ENSG00000198033; TAA
DLAKVQRAV

SEQ ID NO: 93026 - protein, 9 aa, Homo sapiens
  Table A; Target 93026; HLA-C*06:02; TUBA3C; ENSG00000198033; TAA
DLAKVQRAV

SEQ ID NO: 93027 - protein, 11 aa, Homo sapiens
  Table A; Target 93027; HLA-B*08:01; TUBA3C; ENSG00000198033; TAA
DLAKVQRAVCM

SEQ ID NO: 93028 - protein, 9 aa, Homo sapiens
  Table A; Target 93028; HLA-A*25:01; TUBA3C; ENSG00000198033; TAA
DLCTGLQGF

SEQ ID NO: 93029 - protein, 9 aa, Homo sapiens
  Table A; Target 93029; HLA-A*26:01; TUBA3C; ENSG00000198033; TAA
DLCTGLQGF

SEQ ID NO: 93030 - protein, 9 aa, Homo sapiens
  Table A; Target 93030; HLA-A*33:01; TUBA3C; ENSG00000198033; TAA
DLCTGLQGF

SEQ ID NO: 93031 - protein, 9 aa, Homo sapiens
  Table A; Target 93031; HLA-B*08:01; TUBA3C; ENSG00000198033; TAA
DLCTGLQGF

SEQ ID NO: 93032 - protein, 9 aa, Homo sapiens
  Table A; Target 93032; HLA-B*18:01; TUBA3C; ENSG00000198033; TAA
DLCTGLQGF

SEQ ID NO: 93033 - protein, 9 aa, Homo sapiens
  Table A; Target 93033; HLA-C*07:01; TUBA3C; ENSG00000198033; TAA
DLCTGLQGF

SEQ ID NO: 93034 - protein, 10 aa, Homo sapiens
  Table A; Target 93034; HLA-C*07:02; TUBA3C; ENSG00000198033; TAA
DLCTGLQGFL

SEQ ID NO: 93035 - protein, 10 aa, Homo sapiens
  Table A; Target 93035; HLA-A*68:02; TUBA3C; ENSG00000198033; TAA
DLEPTVVDEV

SEQ ID NO: 93036 - protein, 11 aa, Homo sapiens
  Table A; Target 93036; HLA-A*33:01; TUBA3C; ENSG00000198033; TAA
DLEPTVVDEVR

SEQ ID NO: 93037 - protein, 11 aa, Homo sapiens
  Table A; Target 93037; HLA-A*68:02; TUBA3C; ENSG00000198033; TAA
DLEPTVVDEVR

SEQ ID NO: 93038 - protein, 8 aa, Homo sapiens
  Table A; Target 93038; HLA-B*08:01; TUBA3C; ENSG00000198033; TAA
DLMYAKRA

SEQ ID NO: 93039 - protein, 9 aa, Homo sapiens
  Table A; Target 93039; HLA-B*08:01; TUBA3C; ENSG00000198033; TAA
DLMYAKRAF

SEQ ID NO: 93040 - protein, 9 aa, Homo sapiens
  Table A; Target 93040; HLA-A*02:01; TUBA3C; ENSG00000198033; TAA
DLTEFQTNL

SEQ ID NO: 93041 - protein, 9 aa, Homo sapiens
  Table A; Target 93041; HLA-A*02:03; TUBA3C; ENSG00000198033; TAA
DLTEFQTNL

SEQ ID NO: 93042 - protein, 9 aa, Homo sapiens
  Table A; Target 93042; HLA-A*02:04; TUBA3C; ENSG00000198033; TAA
DLTEFQTNL

SEQ ID NO: 93043 - protein, 9 aa, Homo sapiens
  Table A; Target 93043; HLA-A*02:07; TUBA3C; ENSG00000198033; TAA
DLTEFQTNL

SEQ ID NO: 93044 - protein, 9 aa, Homo sapiens
  Table A; Target 93044; HLA-A*24:02; TUBA3C; ENSG00000198033; TAA
DLTEFQTNL

SEQ ID NO: 93045 - protein, 9 aa, Homo sapiens
  Table A; Target 93045; HLA-A*25:01; TUBA3C; ENSG00000198033; TAA
DLTEFQTNL

SEQ ID NO: 93046 - protein, 9 aa, Homo sapiens
  Table A; Target 93046; HLA-A*26:01; TUBA3C; ENSG00000198033; TAA
DLTEFQTNL

SEQ ID NO: 93047 - protein, 9 aa, Homo sapiens
  Table A; Target 93047; HLA-A*68:01; TUBA3C; ENSG00000198033; TAA
DLTEFQTNL

SEQ ID NO: 93048 - protein, 9 aa, Homo sapiens
  Table A; Target 93048; HLA-A*68:02; TUBA3C; ENSG00000198033; TAA
DLTEFQTNL

SEQ ID NO: 93049 - protein, 9 aa, Homo sapiens
  Table A; Target 93049; HLA-B*08:01; TUBA3C; ENSG00000198033; TAA
DLTEFQTNL

SEQ ID NO: 93050 - protein, 9 aa, Homo sapiens
  Table A; Target 93050; HLA-B*13:02; TUBA3C; ENSG00000198033; TAA
DLTEFQTNL

SEQ ID NO: 93051 - protein, 9 aa, Homo sapiens
  Table A; Target 93051; HLA-B*18:01; TUBA3C; ENSG00000198033; TAA
DLTEFQTNL

SEQ ID NO: 93052 - protein, 9 aa, Homo sapiens
  Table A; Target 93052; HLA-B*27:05; TUBA3C; ENSG00000198033; TAA
DLTEFQTNL

SEQ ID NO: 93053 - protein, 9 aa, Homo sapiens
  Table A; Target 93053; HLA-B*38:01; TUBA3C; ENSG00000198033; TAA
DLTEFQTNL

SEQ ID NO: 93054 - protein, 9 aa, Homo sapiens
  Table A; Target 93054; HLA-B*39:01; TUBA3C; ENSG00000198033; TAA
DLTEFQTNL

SEQ ID NO: 93055 - protein, 9 aa, Homo sapiens
  Table A; Target 93055; HLA-B*40:01; TUBA3C; ENSG00000198033; TAA
DLTEFQTNL

SEQ ID NO: 93056 - protein, 9 aa, Homo sapiens
  Table A; Target 93056; HLA-B*40:02; TUBA3C; ENSG00000198033; TAA
DLTEFQTNL

SEQ ID NO: 93057 - protein, 9 aa, Homo sapiens
  Table A; Target 93057; HLA-B*51:01; TUBA3C; ENSG00000198033; TAA
DLTEFQTNL

SEQ ID NO: 93058 - protein, 9 aa, Homo sapiens
  Table A; Target 93058; HLA-B*55:01; TUBA3C; ENSG00000198033; TAA
DLTEFQTNL

SEQ ID NO: 93059 - protein, 9 aa, Homo sapiens
  Table A; Target 93059; HLA-C*16:02; TUBA3C; ENSG00000198033; TAA
DLTEFQTNL

SEQ ID NO: 93060 - protein, 10 aa, Homo sapiens
  Table A; Target 93060; HLA-A*68:02; TUBA3C; ENSG00000198033; TAA
DLTEFQTNLV

SEQ ID NO: 93061 - protein, 10 aa, Homo sapiens
  Table A; Target 93061; HLA-A*33:01; TUBA3C; ENSG00000198033; TAA
DNEAIYDICR

SEQ ID NO: 93062 - protein, 8 aa, Homo sapiens
  Table A; Target 93062; HLA-B*08:01; TUBA3C; ENSG00000198033; TAA
DPRHGKYM

SEQ ID NO: 93063 - protein, 9 aa, Homo sapiens
  Table A; Target 93063; HLA-B*54:01; TUBA3C; ENSG00000198033; TAA
DPRHGKYMA

SEQ ID NO: 93064 - protein, 9 aa, Homo sapiens
  Table A; Target 93064; HLA-A*33:01; TUBA3C; ENSG00000198033; TAA
DSFNTFFSE

SEQ ID NO: 93065 - protein, 10 aa, Homo sapiens
  Table A; Target 93065; HLA-A*68:02; TUBA3C; ENSG00000198033; TAA
DSFNTFFSET

SEQ ID NO: 93066 - protein, 9 aa, Homo sapiens
  Table A; Target 93066; HLA-A*02:03; TUBA3C; ENSG00000198033; TAA
DVNAAIATI

SEQ ID NO: 93067 - protein, 9 aa, Homo sapiens
  Table A; Target 93067; HLA-A*23:01; TUBA3C; ENSG00000198033; TAA
DVNAAIATI

SEQ ID NO: 93068 - protein, 9 aa, Homo sapiens
  Table A; Target 93068; HLA-A*24:02; TUBA3C; ENSG00000198033; TAA
DVNAAIATI

SEQ ID NO: 93069 - protein, 9 aa, Homo sapiens
  Table A; Target 93069; HLA-A*25:01; TUBA3C; ENSG00000198033; TAA
DVNAAIATI

SEQ ID NO: 93070 - protein, 9 aa, Homo sapiens
  Table A; Target 93070; HLA-A*26:01; TUBA3C; ENSG00000198033; TAA
DVNAAIATI

SEQ ID NO: 93071 - protein, 9 aa, Homo sapiens
  Table A; Target 93071; HLA-A*32:01; TUBA3C; ENSG00000198033; TAA
DVNAAIATI

SEQ ID NO: 93072 - protein, 9 aa, Homo sapiens
  Table A; Target 93072; HLA-A*33:01; TUBA3C; ENSG00000198033; TAA
DVNAAIATI

SEQ ID NO: 93073 - protein, 9 aa, Homo sapiens
  Table A; Target 93073; HLA-A*33:03; TUBA3C; ENSG00000198033; TAA
DVNAAIATI

SEQ ID NO: 93074 - protein, 9 aa, Homo sapiens
  Table A; Target 93074; HLA-A*68:01; TUBA3C; ENSG00000198033; TAA
DVNAAIATI

SEQ ID NO: 93075 - protein, 9 aa, Homo sapiens
  Table A; Target 93075; HLA-A*68:02; TUBA3C; ENSG00000198033; TAA
DVNAAIATI

SEQ ID NO: 93076 - protein, 9 aa, Homo sapiens
  Table A; Target 93076; HLA-B*07:02; TUBA3C; ENSG00000198033; TAA
DVNAAIATI

SEQ ID NO: 93077 - protein, 9 aa, Homo sapiens
  Table A; Target 93077; HLA-B*08:01; TUBA3C; ENSG00000198033; TAA
DVNAAIATI

SEQ ID NO: 93078 - protein, 9 aa, Homo sapiens
  Table A; Target 93078; HLA-B*13:02; TUBA3C; ENSG00000198033; TAA
DVNAAIATI

SEQ ID NO: 93079 - protein, 9 aa, Homo sapiens
  Table A; Target 93079; HLA-B*18:01; TUBA3C; ENSG00000198033; TAA
DVNAAIATI

SEQ ID NO: 93080 - protein, 9 aa, Homo sapiens
  Table A; Target 93080; HLA-B*35:01; TUBA3C; ENSG00000198033; TAA
DVNAAIATI

SEQ ID NO: 93081 - protein, 9 aa, Homo sapiens
  Table A; Target 93081; HLA-B*35:03; TUBA3C; ENSG00000198033; TAA
DVNAAIATI

SEQ ID NO: 93082 - protein, 9 aa, Homo sapiens
  Table A; Target 93082; HLA-B*38:01; TUBA3C; ENSG00000198033; TAA
DVNAAIATI

SEQ ID NO: 93083 - protein, 9 aa, Homo sapiens
  Table A; Target 93083; HLA-B*39:01; TUBA3C; ENSG00000198033; TAA
DVNAAIATI

SEQ ID NO: 93084 - protein, 9 aa, Homo sapiens
  Table A; Target 93084; HLA-B*40:02; TUBA3C; ENSG00000198033; TAA
DVNAAIATI

SEQ ID NO: 93085 - protein, 9 aa, Homo sapiens
  Table A; Target 93085; HLA-B*44:02; TUBA3C; ENSG00000198033; TAA
DVNAAIATI

SEQ ID NO: 93086 - protein, 9 aa, Homo sapiens
  Table A; Target 93086; HLA-B*51:01; TUBA3C; ENSG00000198033; TAA
DVNAAIATI

SEQ ID NO: 93087 - protein, 9 aa, Homo sapiens
  Table A; Target 93087; HLA-B*54:01; TUBA3C; ENSG00000198033; TAA
DVNAAIATI

SEQ ID NO: 93088 - protein, 9 aa, Homo sapiens
  Table A; Target 93088; HLA-B*58:01; TUBA3C; ENSG00000198033; TAA
DVNAAIATI

SEQ ID NO: 93089 - protein, 9 aa, Homo sapiens
  Table A; Target 93089; HLA-C*01:02; TUBA3C; ENSG00000198033; TAA
DVNAAIATI

SEQ ID NO: 93090 - protein, 9 aa, Homo sapiens
  Table A; Target 93090; HLA-C*06:02; TUBA3C; ENSG00000198033; TAA
DVNAAIATI

SEQ ID NO: 93091 - protein, 9 aa, Homo sapiens
  Table A; Target 93091; HLA-C*07:04; TUBA3C; ENSG00000198033; TAA
DVNAAIATI

SEQ ID NO: 93092 - protein, 9 aa, Homo sapiens
  Table A; Target 93092; HLA-C*07:06; TUBA3C; ENSG00000198033; TAA
DVNAAIATI

SEQ ID NO: 93093 - protein, 9 aa, Homo sapiens
  Table A; Target 93093; HLA-C*12:03; TUBA3C; ENSG00000198033; TAA
DVNAAIATI

SEQ ID NO: 93094 - protein, 10 aa, Homo sapiens
  Table A; Target 93094; HLA-A*03:01; TUBA3C; ENSG00000198033; TAA
DVNAAIATIK

SEQ ID NO: 93095 - protein, 10 aa, Homo sapiens
  Table A; Target 93095; HLA-A*03:02; TUBA3C; ENSG00000198033; TAA
DVNAAIATIK

SEQ ID NO: 93096 - protein, 10 aa, Homo sapiens
  Table A; Target 93096; HLA-A*11:01; TUBA3C; ENSG00000198033; TAA
DVNAAIATIK

SEQ ID NO: 93097 - protein, 10 aa, Homo sapiens
  Table A; Target 93097; HLA-A*33:01; TUBA3C; ENSG00000198033; TAA
DVNAAIATIK

SEQ ID NO: 93098 - protein, 10 aa, Homo sapiens
  Table A; Target 93098; HLA-A*33:03; TUBA3C; ENSG00000198033; TAA
DVNAAIATIK

SEQ ID NO: 93099 - protein, 10 aa, Homo sapiens
  Table A; Target 93099; HLA-A*68:01; TUBA3C; ENSG00000198033; TAA
DVNAAIATIK

SEQ ID NO: 93100 - protein, 10 aa, Homo sapiens
  Table A; Target 93100; HLA-B*27:02; TUBA3C; ENSG00000198033; TAA
DVNAAIATIK

SEQ ID NO: 93101 - protein, 10 aa, Homo sapiens
  Table A; Target 93101; HLA-C*07:06; TUBA3C; ENSG00000198033; TAA
DVNAAIATIK

SEQ ID NO: 93102 - protein, 11 aa, Homo sapiens
  Table A; Target 93102; HLA-A*33:01; TUBA3C; ENSG00000198033; TAA
DVNAAIATIKT

SEQ ID NO: 93103 - protein, 11 aa, Homo sapiens
  Table A; Target 93103; HLA-A*68:01; TUBA3C; ENSG00000198033; TAA
DVNAAIATIKT

SEQ ID NO: 93104 - protein, 11 aa, Homo sapiens
  Table A; Target 93104; HLA-C*06:02; TUBA3C; ENSG00000198033; TAA
DVNAAIATIKT

SEQ ID NO: 93105 - protein, 8 aa, Homo sapiens
  Table A; Target 93105; HLA-C*07:01; TUBA3C; ENSG00000198033; TAA
DVVPKDVN

SEQ ID NO: 93106 - protein, 9 aa, Homo sapiens
  Table A; Target 93106; HLA-A*25:01; TUBA3C; ENSG00000198033; TAA
DVVPKDVNA

SEQ ID NO: 93107 - protein, 9 aa, Homo sapiens
  Table A; Target 93107; HLA-A*26:01; TUBA3C; ENSG00000198033; TAA
DVVPKDVNA

SEQ ID NO: 93108 - protein, 9 aa, Homo sapiens
  Table A; Target 93108; HLA-A*33:01; TUBA3C; ENSG00000198033; TAA
DVVPKDVNA

SEQ ID NO: 93109 - protein, 9 aa, Homo sapiens
  Table A; Target 93109; HLA-A*33:03; TUBA3C; ENSG00000198033; TAA
DVVPKDVNA

SEQ ID NO: 93110 - protein, 9 aa, Homo sapiens
  Table A; Target 93110; HLA-A*68:01; TUBA3C; ENSG00000198033; TAA
DVVPKDVNA

SEQ ID NO: 93111 - protein, 9 aa, Homo sapiens
  Table A; Target 93111; HLA-A*68:02; TUBA3C; ENSG00000198033; TAA
DVVPKDVNA

SEQ ID NO: 93112 - protein, 9 aa, Homo sapiens
  Table A; Target 93112; HLA-B*08:01; TUBA3C; ENSG00000198033; TAA
DVVPKDVNA

SEQ ID NO: 93113 - protein, 9 aa, Homo sapiens
  Table A; Target 93113; HLA-B*35:03; TUBA3C; ENSG00000198033; TAA
DVVPKDVNA

SEQ ID NO: 93114 - protein, 9 aa, Homo sapiens
  Table A; Target 93114; HLA-B*54:01; TUBA3C; ENSG00000198033; TAA
DVVPKDVNA

SEQ ID NO: 93115 - protein, 9 aa, Homo sapiens
  Table A; Target 93115; HLA-C*07:06; TUBA3C; ENSG00000198033; TAA
DVVPKDVNA

SEQ ID NO: 93116 - protein, 10 aa, Homo sapiens
  Table A; Target 93116; HLA-A*25:01; TUBA3C; ENSG00000198033; TAA
DVVPKDVNAA

SEQ ID NO: 93117 - protein, 10 aa, Homo sapiens
  Table A; Target 93117; HLA-A*26:01; TUBA3C; ENSG00000198033; TAA
DVVPKDVNAA

SEQ ID NO: 93118 - protein, 10 aa, Homo sapiens
  Table A; Target 93118; HLA-A*68:01; TUBA3C; ENSG00000198033; TAA
DVVPKDVNAA

SEQ ID NO: 93119 - protein, 10 aa, Homo sapiens
  Table A; Target 93119; HLA-A*68:02; TUBA3C; ENSG00000198033; TAA
DVVPKDVNAA

SEQ ID NO: 93120 - protein, 10 aa, Homo sapiens
  Table A; Target 93120; HLA-C*07:06; TUBA3C; ENSG00000198033; TAA
DVVPKDVNAA

SEQ ID NO: 93121 - protein, 11 aa, Homo sapiens
  Table A; Target 93121; HLA-A*25:01; TUBA3C; ENSG00000198033; TAA
DVVPKDVNAAI

SEQ ID NO: 93122 - protein, 11 aa, Homo sapiens
  Table A; Target 93122; HLA-A*26:01; TUBA3C; ENSG00000198033; TAA
DVVPKDVNAAI

SEQ ID NO: 93123 - protein, 11 aa, Homo sapiens
  Table A; Target 93123; HLA-A*33:01; TUBA3C; ENSG00000198033; TAA
DVVPKDVNAAI

SEQ ID NO: 93124 - protein, 11 aa, Homo sapiens
  Table A; Target 93124; HLA-A*33:03; TUBA3C; ENSG00000198033; TAA
DVVPKDVNAAI

SEQ ID NO: 93125 - protein, 11 aa, Homo sapiens
  Table A; Target 93125; HLA-A*68:01; TUBA3C; ENSG00000198033; TAA
DVVPKDVNAAI

SEQ ID NO: 93126 - protein, 11 aa, Homo sapiens
  Table A; Target 93126; HLA-A*68:02; TUBA3C; ENSG00000198033; TAA
DVVPKDVNAAI

SEQ ID NO: 93127 - protein, 11 aa, Homo sapiens
  Table A; Target 93127; HLA-C*06:02; TUBA3C; ENSG00000198033; TAA
DVVPKDVNAAI

SEQ ID NO: 93128 - protein, 10 aa, Homo sapiens
  Table A; Target 93128; HLA-B*39:01; TUBA3C; ENSG00000198033; TAA
DYEEVGVDSV

SEQ ID NO: 93129 - protein, 10 aa, Homo sapiens
  Table A; Target 93129; HLA-C*07:01; TUBA3C; ENSG00000198033; TAA
DYEEVGVDSV

SEQ ID NO: 93130 - protein, 8 aa, Homo sapiens
  Table A; Target 93130; HLA-B*08:01; TUBA3C; ENSG00000198033; TAA
DYGKKSKL

SEQ ID NO: 93131 - protein, 8 aa, Homo sapiens
  Table A; Target 93131; HLA-C*07:01; TUBA3C; ENSG00000198033; TAA
DYGKKSKL

SEQ ID NO: 93132 - protein, 10 aa, Homo sapiens
  Table A; Target 93132; HLA-A*24:02; TUBA3C; ENSG00000198033; TAA
DYGKKSKLEF

SEQ ID NO: 93133 - protein, 10 aa, Homo sapiens
  Table A; Target 93133; HLA-A*33:01; TUBA3C; ENSG00000198033; TAA
DYGKKSKLEF

SEQ ID NO: 93134 - protein, 10 aa, Homo sapiens
  Table A; Target 93134; HLA-A*01:01; TUBA3C; ENSG00000198033; TAA
EAEAEEGEEY

SEQ ID NO: 93135 - protein, 10 aa, Homo sapiens
  Table A; Target 93135; HLA-A*26:01; TUBA3C; ENSG00000198033; TAA
EAEAEEGEEY

SEQ ID NO: 93136 - protein, 10 aa, Homo sapiens
  Table A; Target 93136; HLA-B*15:01; TUBA3C; ENSG00000198033; TAA
EAEAEEGEEY

SEQ ID NO: 93137 - protein, 10 aa, Homo sapiens
  Table A; Target 93137; HLA-B*27:02; TUBA3C; ENSG00000198033; TAA
EAEAEEGEEY

SEQ ID NO: 93138 - protein, 10 aa, Homo sapiens
  Table A; Target 93138; HLA-B*27:05; TUBA3C; ENSG00000198033; TAA
EAEAEEGEEY

SEQ ID NO: 93139 - protein, 10 aa, Homo sapiens
  Table A; Target 93139; HLA-B*35:01; TUBA3C; ENSG00000198033; TAA
EAEAEEGEEY

SEQ ID NO: 93140 - protein, 10 aa, Homo sapiens
  Table A; Target 93140; HLA-B*39:01; TUBA3C; ENSG00000198033; TAA
EAEAEEGEEY

SEQ ID NO: 93141 - protein, 10 aa, Homo sapiens
  Table A; Target 93141; HLA-B*55:01; TUBA3C; ENSG00000198033; TAA
EAEAEEGEEY

SEQ ID NO: 93142 - protein, 10 aa, Homo sapiens
  Table A; Target 93142; HLA-C*03:03; TUBA3C; ENSG00000198033; TAA
EAEAEEGEEY

SEQ ID NO: 93143 - protein, 10 aa, Homo sapiens
  Table A; Target 93143; HLA-C*04:01; TUBA3C; ENSG00000198033; TAA
EAEAEEGEEY

SEQ ID NO: 93144 - protein, 10 aa, Homo sapiens
  Table A; Target 93144; HLA-C*07:01; TUBA3C; ENSG00000198033; TAA
EAEAEEGEEY

SEQ ID NO: 93145 - protein, 10 aa, Homo sapiens
  Table A; Target 93145; HLA-C*07:04; TUBA3C; ENSG00000198033; TAA
EAEAEEGEEY

SEQ ID NO: 93146 - protein, 10 aa, Homo sapiens
  Table A; Target 93146; HLA-C*07:06; TUBA3C; ENSG00000198033; TAA
EAEAEEGEEY

SEQ ID NO: 93147 - protein, 8 aa, Homo sapiens
  Table A; Target 93147; HLA-A*01:01; TUBA3C; ENSG00000198033; TAA
EAEEGEEY

SEQ ID NO: 93148 - protein, 8 aa, Homo sapiens
  Table A; Target 93148; HLA-B*27:05; TUBA3C; ENSG00000198033; TAA
EAEEGEEY

SEQ ID NO: 93149 - protein, 8 aa, Homo sapiens
  Table A; Target 93149; HLA-B*35:01; TUBA3C; ENSG00000198033; TAA
EAEEGEEY

SEQ ID NO: 93150 - protein, 8 aa, Homo sapiens
  Table A; Target 93150; HLA-B*39:01; TUBA3C; ENSG00000198033; TAA
EAEEGEEY

SEQ ID NO: 93151 - protein, 8 aa, Homo sapiens
  Table A; Target 93151; HLA-B*55:01; TUBA3C; ENSG00000198033; TAA
EAEEGEEY

SEQ ID NO: 93152 - protein, 8 aa, Homo sapiens
  Table A; Target 93152; HLA-C*01:02; TUBA3C; ENSG00000198033; TAA
EAEEGEEY

SEQ ID NO: 93153 - protein, 8 aa, Homo sapiens
  Table A; Target 93153; HLA-C*03:03; TUBA3C; ENSG00000198033; TAA
EAEEGEEY

SEQ ID NO: 93154 - protein, 8 aa, Homo sapiens
  Table A; Target 93154; HLA-C*04:01; TUBA3C; ENSG00000198033; TAA
EAEEGEEY

SEQ ID NO: 93155 - protein, 8 aa, Homo sapiens
  Table A; Target 93155; HLA-C*05:01; TUBA3C; ENSG00000198033; TAA
EAEEGEEY

SEQ ID NO: 93156 - protein, 8 aa, Homo sapiens
  Table A; Target 93156; HLA-C*07:01; TUBA3C; ENSG00000198033; TAA
EAEEGEEY

SEQ ID NO: 93157 - protein, 8 aa, Homo sapiens
  Table A; Target 93157; HLA-C*07:06; TUBA3C; ENSG00000198033; TAA
EAEEGEEY

SEQ ID NO: 93158 - protein, 8 aa, Homo sapiens
  Table A; Target 93158; HLA-C*12:03; TUBA3C; ENSG00000198033; TAA
EAEEGEEY

SEQ ID NO: 93159 - protein, 8 aa, Homo sapiens
  Table A; Target 93159; HLA-C*16:02; TUBA3C; ENSG00000198033; TAA
EAEEGEEY

SEQ ID NO: 93160 - protein, 8 aa, Homo sapiens
  Table A; Target 93160; HLA-A*33:01; TUBA3C; ENSG00000198033; TAA
EAIYDICR

SEQ ID NO: 93161 - protein, 8 aa, Homo sapiens
  Table A; Target 93161; HLA-A*33:03; TUBA3C; ENSG00000198033; TAA
EAIYDICR

SEQ ID NO: 93162 - protein, 8 aa, Homo sapiens
  Table A; Target 93162; HLA-A*68:01; TUBA3C; ENSG00000198033; TAA
EAIYDICR

SEQ ID NO: 93163 - protein, 8 aa, Homo sapiens
  Table A; Target 93163; HLA-B*27:02; TUBA3C; ENSG00000198033; TAA
EAIYDICR

SEQ ID NO: 93164 - protein, 8 aa, Homo sapiens
  Table A; Target 93164; HLA-C*07:06; TUBA3C; ENSG00000198033; TAA
EAIYDICR

SEQ ID NO: 93165 - protein, 9 aa, Homo sapiens
  Table A; Target 93165; HLA-A*26:01; TUBA3C; ENSG00000198033; TAA
EAIYDICRR

SEQ ID NO: 93166 - protein, 9 aa, Homo sapiens
  Table A; Target 93166; HLA-A*33:01; TUBA3C; ENSG00000198033; TAA
EAIYDICRR

SEQ ID NO: 93167 - protein, 9 aa, Homo sapiens
  Table A; Target 93167; HLA-A*33:03; TUBA3C; ENSG00000198033; TAA
EAIYDICRR

SEQ ID NO: 93168 - protein, 9 aa, Homo sapiens
  Table A; Target 93168; HLA-A*68:01; TUBA3C; ENSG00000198033; TAA
EAIYDICRR

SEQ ID NO: 93169 - protein, 9 aa, Homo sapiens
  Table A; Target 93169; HLA-A*68:02; TUBA3C; ENSG00000198033; TAA
EAIYDICRR

SEQ ID NO: 93170 - protein, 9 aa, Homo sapiens
  Table A; Target 93170; HLA-C*07:06; TUBA3C; ENSG00000198033; TAA
EAIYDICRR

SEQ ID NO: 93171 - protein, 9 aa, Homo sapiens
  Table A; Target 93171; HLA-A*25:01; TUBA3C; ENSG00000198033; TAA
EAREDLAAL

SEQ ID NO: 93172 - protein, 9 aa, Homo sapiens
  Table A; Target 93172; HLA-A*26:01; TUBA3C; ENSG00000198033; TAA
EAREDLAAL

SEQ ID NO: 93173 - protein, 9 aa, Homo sapiens
  Table A; Target 93173; HLA-A*33:01; TUBA3C; ENSG00000198033; TAA
EAREDLAAL

SEQ ID NO: 93174 - protein, 9 aa, Homo sapiens
  Table A; Target 93174; HLA-A*33:03; TUBA3C; ENSG00000198033; TAA
EAREDLAAL

SEQ ID NO: 93175 - protein, 9 aa, Homo sapiens
  Table A; Target 93175; HLA-A*68:02; TUBA3C; ENSG00000198033; TAA
EAREDLAAL

SEQ ID NO: 93176 - protein, 9 aa, Homo sapiens
  Table A; Target 93176; HLA-B*07:02; TUBA3C; ENSG00000198033; TAA
EAREDLAAL

SEQ ID NO: 93177 - protein, 9 aa, Homo sapiens
  Table A; Target 93177; HLA-B*08:01; TUBA3C; ENSG00000198033; TAA
EAREDLAAL

SEQ ID NO: 93178 - protein, 9 aa, Homo sapiens
  Table A; Target 93178; HLA-B*35:01; TUBA3C; ENSG00000198033; TAA
EAREDLAAL

SEQ ID NO: 93179 - protein, 9 aa, Homo sapiens
  Table A; Target 93179; HLA-B*35:03; TUBA3C; ENSG00000198033; TAA
EAREDLAAL

SEQ ID NO: 93180 - protein, 9 aa, Homo sapiens
  Table A; Target 93180; HLA-B*40:02; TUBA3C; ENSG00000198033; TAA
EAREDLAAL

SEQ ID NO: 93181 - protein, 9 aa, Homo sapiens
  Table A; Target 93181; HLA-B*46:01; TUBA3C; ENSG00000198033; TAA
EAREDLAAL

SEQ ID NO: 93182 - protein, 9 aa, Homo sapiens
  Table A; Target 93182; HLA-B*51:01; TUBA3C; ENSG00000198033; TAA
EAREDLAAL

SEQ ID NO: 93183 - protein, 9 aa, Homo sapiens
  Table A; Target 93183; HLA-B*54:01; TUBA3C; ENSG00000198033; TAA
EAREDLAAL

SEQ ID NO: 93184 - protein, 9 aa, Homo sapiens
  Table A; Target 93184; HLA-C*01:02; TUBA3C; ENSG00000198033; TAA
EAREDLAAL

SEQ ID NO: 93185 - protein, 9 aa, Homo sapiens
  Table A; Target 93185; HLA-C*03:03; TUBA3C; ENSG00000198033; TAA
EAREDLAAL

SEQ ID NO: 93186 - protein, 9 aa, Homo sapiens
  Table A; Target 93186; HLA-C*07:02; TUBA3C; ENSG00000198033; TAA
EAREDLAAL

SEQ ID NO: 93187 - protein, 9 aa, Homo sapiens
  Table A; Target 93187; HLA-C*07:06; TUBA3C; ENSG00000198033; TAA
EAREDLAAL

SEQ ID NO: 93188 - protein, 11 aa, Homo sapiens
  Table A; Target 93188; HLA-A*33:01; TUBA3C; ENSG00000198033; TAA
EAREDLAALEK

SEQ ID NO: 93189 - protein, 11 aa, Homo sapiens
  Table A; Target 93189; HLA-A*33:03; TUBA3C; ENSG00000198033; TAA
EAREDLAALEK

SEQ ID NO: 93190 - protein, 11 aa, Homo sapiens
  Table A; Target 93190; HLA-A*68:01; TUBA3C; ENSG00000198033; TAA
EAREDLAALEK

SEQ ID NO: 93191 - protein, 11 aa, Homo sapiens
  Table A; Target 93191; HLA-C*07:06; TUBA3C; ENSG00000198033; TAA
EAREDLAALEK

SEQ ID NO: 93192 - protein, 9 aa, Homo sapiens
  Table A; Target 93192; HLA-A*33:01; TUBA3C; ENSG00000198033; TAA
EAWARLDHK

SEQ ID NO: 93193 - protein, 9 aa, Homo sapiens
  Table A; Target 93193; HLA-A*26:01; TUBA3C; ENSG00000198033; TAA
ECISIHVGQ

SEQ ID NO: 93194 - protein, 9 aa, Homo sapiens
  Table A; Target 93194; HLA-C*07:01; TUBA3C; ENSG00000198033; TAA
ECISIHVGQ

SEQ ID NO: 93195 - protein, 10 aa, Homo sapiens
  Table A; Target 93195; HLA-A*26:01; TUBA3C; ENSG00000198033; TAA
ECISIHVGQA

SEQ ID NO: 93196 - protein, 8 aa, Homo sapiens
  Table A; Target 93196; HLA-C*06:02; TUBA3C; ENSG00000198033; TAA
EDAANNYA

SEQ ID NO: 93197 - protein, 8 aa, Homo sapiens
  Table A; Target 93197; HLA-C*07:01; TUBA3C; ENSG00000198033; TAA
EDAANNYA

SEQ ID NO: 93198 - protein, 9 aa, Homo sapiens
  Table A; Target 93198; HLA-A*33:01; TUBA3C; ENSG00000198033; TAA
EDAANNYAR

SEQ ID NO: 93199 - protein, 9 aa, Homo sapiens
  Table A; Target 93199; HLA-A*33:03; TUBA3C; ENSG00000198033; TAA
EDAANNYAR

SEQ ID NO: 93200 - protein, 9 aa, Homo sapiens
  Table A; Target 93200; HLA-A*68:01; TUBA3C; ENSG00000198033; TAA
EDAANNYAR

SEQ ID NO: 93201 - protein, 9 aa, Homo sapiens
  Table A; Target 93201; HLA-A*68:02; TUBA3C; ENSG00000198033; TAA
EDAANNYAR

SEQ ID NO: 93202 - protein, 9 aa, Homo sapiens
  Table A; Target 93202; HLA-B*27:02; TUBA3C; ENSG00000198033; TAA
EDAANNYAR

SEQ ID NO: 93203 - protein, 9 aa, Homo sapiens
  Table A; Target 93203; HLA-B*27:05; TUBA3C; ENSG00000198033; TAA
EDAANNYAR

SEQ ID NO: 93204 - protein, 9 aa, Homo sapiens
  Table A; Target 93204; HLA-B*39:01; TUBA3C; ENSG00000198033; TAA
EDAANNYAR

SEQ ID NO: 93205 - protein, 9 aa, Homo sapiens
  Table A; Target 93205; HLA-C*07:01; TUBA3C; ENSG00000198033; TAA
EDAANNYAR

SEQ ID NO: 93206 - protein, 9 aa, Homo sapiens
  Table A; Target 93206; HLA-C*07:02; TUBA3C; ENSG00000198033; TAA
EDAANNYAR

SEQ ID NO: 93207 - protein, 9 aa, Homo sapiens
  Table A; Target 93207; HLA-C*07:06; TUBA3C; ENSG00000198033; TAA
EDAANNYAR

SEQ ID NO: 93208 - protein, 10 aa, Homo sapiens
  Table A; Target 93208; HLA-C*07:01; TUBA3C; ENSG00000198033; TAA
EDAANNYARG

SEQ ID NO: 93209 - protein, 8 aa, Homo sapiens
  Table A; Target 93209; HLA-A*11:01; TUBA3C; ENSG00000198033; TAA
EDLAALEK

SEQ ID NO: 93210 - protein, 8 aa, Homo sapiens
  Table A; Target 93210; HLA-B*27:02; TUBA3C; ENSG00000198033; TAA
EDLAALEK

SEQ ID NO: 93211 - protein, 8 aa, Homo sapiens
  Table A; Target 93211; HLA-C*07:01; TUBA3C; ENSG00000198033; TAA
EDLAALEK

SEQ ID NO: 93212 - protein, 10 aa, Homo sapiens
  Table A; Target 93212; HLA-B*44:02; TUBA3C; ENSG00000198033; TAA
EDLAALEKDY

SEQ ID NO: 93213 - protein, 10 aa, Homo sapiens
  Table A; Target 93213; HLA-B*44:03; TUBA3C; ENSG00000198033; TAA
EDLAALEKDY

SEQ ID NO: 93214 - protein, 10 aa, Homo sapiens
  Table A; Target 93214; HLA-C*07:01; TUBA3C; ENSG00000198033; TAA
EDLAALEKDY

SEQ ID NO: 93215 - protein, 8 aa, Homo sapiens
  Table A; Target 93215; HLA-B*18:01; TUBA3C; ENSG00000198033; TAA
EEGEFSEA

SEQ ID NO: 93216 - protein, 8 aa, Homo sapiens
  Table A; Target 93216; HLA-B*40:02; TUBA3C; ENSG00000198033; TAA
EEGEFSEA

SEQ ID NO: 93217 - protein, 8 aa, Homo sapiens
  Table A; Target 93217; HLA-B*49:01; TUBA3C; ENSG00000198033; TAA
EEGEFSEA

SEQ ID NO: 93218 - protein, 9 aa, Homo sapiens
  Table A; Target 93218; HLA-A*33:03; TUBA3C; ENSG00000198033; TAA
EEGEFSEAR

SEQ ID NO: 93219 - protein, 9 aa, Homo sapiens
  Table A; Target 93219; HLA-B*27:02; TUBA3C; ENSG00000198033; TAA
EEGEFSEAR

SEQ ID NO: 93220 - protein, 9 aa, Homo sapiens
  Table A; Target 93220; HLA-B*44:02; TUBA3C; ENSG00000198033; TAA
EEGEFSEAR

SEQ ID NO: 93221 - protein, 8 aa, Homo sapiens
  Table A; Target 93221; HLA-A*30:01; TUBA3C; ENSG00000198033; TAA
EEVGVDSV

SEQ ID NO: 93222 - protein, 8 aa, Homo sapiens
  Table A; Target 93222; HLA-B*18:01; TUBA3C; ENSG00000198033; TAA
EEVGVDSV

SEQ ID NO: 93223 - protein, 8 aa, Homo sapiens
  Table A; Target 93223; HLA-B*39:01; TUBA3C; ENSG00000198033; TAA
EEVGVDSV

SEQ ID NO: 93224 - protein, 8 aa, Homo sapiens
  Table A; Target 93224; HLA-B*40:01; TUBA3C; ENSG00000198033; TAA
EEVGVDSV

SEQ ID NO: 93225 - protein, 8 aa, Homo sapiens
  Table A; Target 93225; HLA-B*40:02; TUBA3C; ENSG00000198033; TAA
EEVGVDSV

SEQ ID NO: 93226 - protein, 8 aa, Homo sapiens
  Table A; Target 93226; HLA-B*49:01; TUBA3C; ENSG00000198033; TAA
EEVGVDSV

SEQ ID NO: 93227 - protein, 8 aa, Homo sapiens
  Table A; Target 93227; HLA-C*07:01; TUBA3C; ENSG00000198033; TAA
EEVGVDSV

SEQ ID NO: 93228 - protein, 8 aa, Homo sapiens
  Table A; Target 93228; HLA-C*12:03; TUBA3C; ENSG00000198033; TAA
EEVGVDSV

SEQ ID NO: 93229 - protein, 8 aa, Homo sapiens
  Table A; Target 93229; HLA-C*16:04; TUBA3C; ENSG00000198033; TAA
EEVGVDSV

SEQ ID NO: 93230 - protein, 10 aa, Homo sapiens
  Table A; Target 93230; HLA-A*30:01; TUBA3C; ENSG00000198033; TAA
EEVGVDSVEA

SEQ ID NO: 93231 - protein, 10 aa, Homo sapiens
  Table A; Target 93231; HLA-A*68:02; TUBA3C; ENSG00000198033; TAA
EEVGVDSVEA

SEQ ID NO: 93232 - protein, 10 aa, Homo sapiens
  Table A; Target 93232; HLA-B*39:01; TUBA3C; ENSG00000198033; TAA
EEVGVDSVEA

SEQ ID NO: 93233 - protein, 10 aa, Homo sapiens
  Table A; Target 93233; HLA-B*40:01; TUBA3C; ENSG00000198033; TAA
EEVGVDSVEA

SEQ ID NO: 93234 - protein, 10 aa, Homo sapiens
  Table A; Target 93234; HLA-B*40:02; TUBA3C; ENSG00000198033; TAA
EEVGVDSVEA

SEQ ID NO: 93235 - protein, 10 aa, Homo sapiens
  Table A; Target 93235; HLA-A*33:03; TUBA3C; ENSG00000198033; TAA
EFAIYPAPQV

SEQ ID NO: 93236 - protein, 10 aa, Homo sapiens
  Table A; Target 93236; HLA-A*68:02; TUBA3C; ENSG00000198033; TAA
EFAIYPAPQV

SEQ ID NO: 93237 - protein, 10 aa, Homo sapiens
  Table A; Target 93237; HLA-B*07:02; TUBA3C; ENSG00000198033; TAA
EFAIYPAPQV

SEQ ID NO: 93238 - protein, 10 aa, Homo sapiens
  Table A; Target 93238; HLA-C*04:01; TUBA3C; ENSG00000198033; TAA
EFAIYPAPQV

SEQ ID NO: 93239 - protein, 10 aa, Homo sapiens
  Table A; Target 93239; HLA-C*06:02; TUBA3C; ENSG00000198033; TAA
EFAIYPAPQV

SEQ ID NO: 93240 - protein, 10 aa, Homo sapiens
  Table A; Target 93240; HLA-C*07:01; TUBA3C; ENSG00000198033; TAA
EFAIYPAPQV

SEQ ID NO: 93241 - protein, 10 aa, Homo sapiens
  Table A; Target 93241; HLA-C*07:02; TUBA3C; ENSG00000198033; TAA
EFAIYPAPQV

SEQ ID NO: 93242 - protein, 9 aa, Homo sapiens
  Table A; Target 93242; HLA-A*29:02; TUBA3C; ENSG00000198033; TAA
EFQTNLVPY

SEQ ID NO: 93243 - protein, 9 aa, Homo sapiens
  Table A; Target 93243; HLA-A*33:01; TUBA3C; ENSG00000198033; TAA
EFQTNLVPY

SEQ ID NO: 93244 - protein, 9 aa, Homo sapiens
  Table A; Target 93244; HLA-A*33:03; TUBA3C; ENSG00000198033; TAA
EFQTNLVPY

SEQ ID NO: 93245 - protein, 9 aa, Homo sapiens
  Table A; Target 93245; HLA-C*04:01; TUBA3C; ENSG00000198033; TAA
EFQTNLVPY

SEQ ID NO: 93246 - protein, 9 aa, Homo sapiens
  Table A; Target 93246; HLA-C*07:01; TUBA3C; ENSG00000198033; TAA
EFQTNLVPY

SEQ ID NO: 93247 - protein, 9 aa, Homo sapiens
  Table A; Target 93247; HLA-C*14:02; TUBA3C; ENSG00000198033; TAA
EFQTNLVPY

SEQ ID NO: 93248 - protein, 11 aa, Homo sapiens
  Table A; Target 93248; HLA-A*33:01; TUBA3C; ENSG00000198033; TAA
EFQTNLVPYPR

SEQ ID NO: 93249 - protein, 11 aa, Homo sapiens
  Table A; Target 93249; HLA-A*33:03; TUBA3C; ENSG00000198033; TAA
EFQTNLVPYPR

SEQ ID NO: 93250 - protein, 9 aa, Homo sapiens
  Table A; Target 93250; HLA-C*14:02; TUBA3C; ENSG00000198033; TAA
EFSEAREDL

SEQ ID NO: 93251 - protein, 8 aa, Homo sapiens
  Table A; Target 93251; HLA-C*04:01; TUBA3C; ENSG00000198033; TAA
EGMEEGEF

SEQ ID NO: 93252 - protein, 8 aa, Homo sapiens
  Table A; Target 93252; HLA-C*05:01; TUBA3C; ENSG00000198033; TAA
EGMEEGEF

SEQ ID NO: 93253 - protein, 11 aa, Homo sapiens
  Table A; Target 93253; HLA-B*54:01; TUBA3C; ENSG00000198033; TAA
EGMEEGEFSEA

SEQ ID NO: 93254 - protein, 8 aa, Homo sapiens
  Table A; Target 93254; HLA-B*39:01; TUBA3C; ENSG00000198033; TAA
EHGIQPDG

SEQ ID NO: 93255 - protein, 8 aa, Homo sapiens
  Table A; Target 93255; HLA-C*07:01; TUBA3C; ENSG00000198033; TAA
EHGIQPDG

SEQ ID NO: 93256 - protein, 10 aa, Homo sapiens
  Table A; Target 93256; HLA-B*27:05; TUBA3C; ENSG00000198033; TAA
EHGIQPDGQM

SEQ ID NO: 93257 - protein, 10 aa, Homo sapiens
  Table A; Target 93257; HLA-B*38:01; TUBA3C; ENSG00000198033; TAA
EHGIQPDGQM

SEQ ID NO: 93258 - protein, 10 aa, Homo sapiens
  Table A; Target 93258; HLA-B*39:01; TUBA3C; ENSG00000198033; TAA
EHGIQPDGQM

SEQ ID NO: 93259 - protein, 10 aa, Homo sapiens
  Table A; Target 93259; HLA-C*04:01; TUBA3C; ENSG00000198033; TAA
EHGIQPDGQM

SEQ ID NO: 93260 - protein, 10 aa, Homo sapiens
  Table A; Target 93260; HLA-C*07:01; TUBA3C; ENSG00000198033; TAA
EHGIQPDGQM

SEQ ID NO: 93261 - protein, 9 aa, Homo sapiens
  Table A; Target 93261; HLA-A*68:02; TUBA3C; ENSG00000198033; TAA
EHSDCAFMV

SEQ ID NO: 93262 - protein, 9 aa, Homo sapiens
  Table A; Target 93262; HLA-B*38:01; TUBA3C; ENSG00000198033; TAA
EHSDCAFMV

SEQ ID NO: 93263 - protein, 9 aa, Homo sapiens
  Table A; Target 93263; HLA-B*39:01; TUBA3C; ENSG00000198033; TAA
EHSDCAFMV

SEQ ID NO: 93264 - protein, 9 aa, Homo sapiens
  Table A; Target 93264; HLA-A*11:01; TUBA3C; ENSG00000198033; TAA
EIVDLVLDR

SEQ ID NO: 93265 - protein, 9 aa, Homo sapiens
  Table A; Target 93265; HLA-A*25:01; TUBA3C; ENSG00000198033; TAA
EIVDLVLDR

SEQ ID NO: 93266 - protein, 9 aa, Homo sapiens
  Table A; Target 93266; HLA-A*26:01; TUBA3C; ENSG00000198033; TAA
EIVDLVLDR

SEQ ID NO: 93267 - protein, 9 aa, Homo sapiens
  Table A; Target 93267; HLA-A*29:02; TUBA3C; ENSG00000198033; TAA
EIVDLVLDR

SEQ ID NO: 93268 - protein, 9 aa, Homo sapiens
  Table A; Target 93268; HLA-A*33:01; TUBA3C; ENSG00000198033; TAA
EIVDLVLDR

SEQ ID NO: 93269 - protein, 9 aa, Homo sapiens
  Table A; Target 93269; HLA-A*33:03; TUBA3C; ENSG00000198033; TAA
EIVDLVLDR

SEQ ID NO: 93270 - protein, 9 aa, Homo sapiens
  Table A; Target 93270; HLA-A*68:01; TUBA3C; ENSG00000198033; TAA
EIVDLVLDR

SEQ ID NO: 93271 - protein, 9 aa, Homo sapiens
  Table A; Target 93271; HLA-A*68:02; TUBA3C; ENSG00000198033; TAA
EIVDLVLDR

SEQ ID NO: 93272 - protein, 9 aa, Homo sapiens
  Table A; Target 93272; HLA-B*27:02; TUBA3C; ENSG00000198033; TAA
EIVDLVLDR

SEQ ID NO: 93273 - protein, 9 aa, Homo sapiens
  Table A; Target 93273; HLA-B*35:01; TUBA3C; ENSG00000198033; TAA
EIVDLVLDR

SEQ ID NO: 93274 - protein, 9 aa, Homo sapiens
  Table A; Target 93274; HLA-C*07:06; TUBA3C; ENSG00000198033; TAA
EIVDLVLDR

SEQ ID NO: 93275 - protein, 9 aa, Homo sapiens
  Table A; Target 93275; HLA-C*12:03; TUBA3C; ENSG00000198033; TAA
EIVDLVLDR

SEQ ID NO: 93276 - protein, 10 aa, Homo sapiens
  Table A; Target 93276; HLA-A*02:07; TUBA3C; ENSG00000198033; TAA
EIVDLVLDRI

SEQ ID NO: 93277 - protein, 10 aa, Homo sapiens
  Table A; Target 93277; HLA-A*25:01; TUBA3C; ENSG00000198033; TAA
EIVDLVLDRI

SEQ ID NO: 93278 - protein, 10 aa, Homo sapiens
  Table A; Target 93278; HLA-A*26:01; TUBA3C; ENSG00000198033; TAA
EIVDLVLDRI

SEQ ID NO: 93279 - protein, 10 aa, Homo sapiens
  Table A; Target 93279; HLA-A*68:02; TUBA3C; ENSG00000198033; TAA
EIVDLVLDRI

SEQ ID NO: 93280 - protein, 10 aa, Homo sapiens
  Table A; Target 93280; HLA-B*44:03; TUBA3C; ENSG00000198033; TAA
EIVDLVLDRI

SEQ ID NO: 93281 - protein, 8 aa, Homo sapiens
  Table A; Target 93281; HLA-C*07:01; TUBA3C; ENSG00000198033; TAA
EKAYHEQL

SEQ ID NO: 93282 - protein, 8 aa, Homo sapiens
  Table A; Target 93282; HLA-A*33:03; TUBA3C; ENSG00000198033; TAA
EPANQMVK

SEQ ID NO: 93283 - protein, 8 aa, Homo sapiens
  Table A; Target 93283; HLA-A*68:01; TUBA3C; ENSG00000198033; TAA
EPANQMVK

SEQ ID NO: 93284 - protein, 8 aa, Homo sapiens
  Table A; Target 93284; HLA-B*51:01; TUBA3C; ENSG00000198033; TAA
EPANQMVK

SEQ ID NO: 93285 - protein, 8 aa, Homo sapiens
  Table A; Target 93285; HLA-C*07:01; TUBA3C; ENSG00000198033; TAA
EPANQMVK

SEQ ID NO: 93286 - protein, 9 aa, Homo sapiens
  Table A; Target 93286; HLA-A*68:01; TUBA3C; ENSG00000198033; TAA
EPANQMVKC

SEQ ID NO: 93287 - protein, 9 aa, Homo sapiens
  Table A; Target 93287; HLA-A*68:02; TUBA3C; ENSG00000198033; TAA
EPANQMVKC

SEQ ID NO: 93288 - protein, 9 aa, Homo sapiens
  Table A; Target 93288; HLA-B*35:03; TUBA3C; ENSG00000198033; TAA
EPANQMVKC

SEQ ID NO: 93289 - protein, 9 aa, Homo sapiens
  Table A; Target 93289; HLA-B*51:01; TUBA3C; ENSG00000198033; TAA
EPANQMVKC

SEQ ID NO: 93290 - protein, 9 aa, Homo sapiens
  Table A; Target 93290; HLA-B*54:01; TUBA3C; ENSG00000198033; TAA
EPANQMVKC

SEQ ID NO: 93291 - protein, 9 aa, Homo sapiens
  Table A; Target 93291; HLA-B*55:01; TUBA3C; ENSG00000198033; TAA
EPANQMVKC

SEQ ID NO: 93292 - protein, 9 aa, Homo sapiens
  Table A; Target 93292; HLA-B*56:01; TUBA3C; ENSG00000198033; TAA
EPANQMVKC

SEQ ID NO: 93293 - protein, 8 aa, Homo sapiens
  Table A; Target 93293; HLA-B*35:01; TUBA3C; ENSG00000198033; TAA
EPTVVDEV

SEQ ID NO: 93294 - protein, 8 aa, Homo sapiens
  Table A; Target 93294; HLA-B*35:03; TUBA3C; ENSG00000198033; TAA
EPTVVDEV

SEQ ID NO: 93295 - protein, 8 aa, Homo sapiens
  Table A; Target 93295; HLA-B*51:01; TUBA3C; ENSG00000198033; TAA
EPTVVDEV

SEQ ID NO: 93296 - protein, 8 aa, Homo sapiens
  Table A; Target 93296; HLA-B*54:01; TUBA3C; ENSG00000198033; TAA
EPTVVDEV

SEQ ID NO: 93297 - protein, 8 aa, Homo sapiens
  Table A; Target 93297; HLA-B*55:01; TUBA3C; ENSG00000198033; TAA
EPTVVDEV

SEQ ID NO: 93298 - protein, 8 aa, Homo sapiens
  Table A; Target 93298; HLA-B*56:01; TUBA3C; ENSG00000198033; TAA
EPTVVDEV

SEQ ID NO: 93299 - protein, 8 aa, Homo sapiens
  Table A; Target 93299; HLA-C*04:01; TUBA3C; ENSG00000198033; TAA
EPTVVDEV

SEQ ID NO: 93300 - protein, 8 aa, Homo sapiens
  Table A; Target 93300; HLA-C*07:01; TUBA3C; ENSG00000198033; TAA
EPTVVDEV

SEQ ID NO: 93301 - protein, 9 aa, Homo sapiens
  Table A; Target 93301; HLA-A*33:03; TUBA3C; ENSG00000198033; TAA
EPTVVDEVR

SEQ ID NO: 93302 - protein, 9 aa, Homo sapiens
  Table A; Target 93302; HLA-A*68:01; TUBA3C; ENSG00000198033; TAA
EPTVVDEVR

SEQ ID NO: 93303 - protein, 9 aa, Homo sapiens
  Table A; Target 93303; HLA-A*68:02; TUBA3C; ENSG00000198033; TAA
EPTVVDEVR

SEQ ID NO: 93304 - protein, 9 aa, Homo sapiens
  Table A; Target 93304; HLA-B*27:02; TUBA3C; ENSG00000198033; TAA
EPTVVDEVR

SEQ ID NO: 93305 - protein, 9 aa, Homo sapiens
  Table A; Target 93305; HLA-B*35:01; TUBA3C; ENSG00000198033; TAA
EPTVVDEVR

SEQ ID NO: 93306 - protein, 9 aa, Homo sapiens
  Table A; Target 93306; HLA-B*35:03; TUBA3C; ENSG00000198033; TAA
EPTVVDEVR

SEQ ID NO: 93307 - protein, 9 aa, Homo sapiens
  Table A; Target 93307; HLA-B*55:01; TUBA3C; ENSG00000198033; TAA
EPTVVDEVR

SEQ ID NO: 93308 - protein, 9 aa, Homo sapiens
  Table A; Target 93308; HLA-C*03:03; TUBA3C; ENSG00000198033; TAA
EPTVVDEVR

SEQ ID NO: 93309 - protein, 9 aa, Homo sapiens
  Table A; Target 93309; HLA-C*07:06; TUBA3C; ENSG00000198033; TAA
EPTVVDEVR

SEQ ID NO: 93310 - protein, 8 aa, Homo sapiens
  Table A; Target 93310; HLA-B*51:01; TUBA3C; ENSG00000198033; TAA
EPYNSILT

SEQ ID NO: 93311 - protein, 9 aa, Homo sapiens
  Table A; Target 93311; HLA-A*33:03; TUBA3C; ENSG00000198033; TAA
EPYNSILTT

SEQ ID NO: 93312 - protein, 9 aa, Homo sapiens
  Table A; Target 93312; HLA-B*35:01; TUBA3C; ENSG00000198033; TAA
EPYNSILTT

SEQ ID NO: 93313 - protein, 9 aa, Homo sapiens
  Table A; Target 93313; HLA-B*35:03; TUBA3C; ENSG00000198033; TAA
EPYNSILTT

SEQ ID NO: 93314 - protein, 9 aa, Homo sapiens
  Table A; Target 93314; HLA-B*51:01; TUBA3C; ENSG00000198033; TAA
EPYNSILTT

SEQ ID NO: 93315 - protein, 9 aa, Homo sapiens
  Table A; Target 93315; HLA-B*54:01; TUBA3C; ENSG00000198033; TAA
EPYNSILTT

SEQ ID NO: 93316 - protein, 9 aa, Homo sapiens
  Table A; Target 93316; HLA-B*55:01; TUBA3C; ENSG00000198033; TAA
EPYNSILTT

SEQ ID NO: 93317 - protein, 9 aa, Homo sapiens
  Table A; Target 93317; HLA-B*56:01; TUBA3C; ENSG00000198033; TAA
EPYNSILTT

SEQ ID NO: 93318 - protein, 10 aa, Homo sapiens
  Table A; Target 93318; HLA-A*25:01; TUBA3C; ENSG00000198033; TAA
EPYNSILTTH

SEQ ID NO: 93319 - protein, 10 aa, Homo sapiens
  Table A; Target 93319; HLA-A*26:01; TUBA3C; ENSG00000198033; TAA
EPYNSILTTH

SEQ ID NO: 93320 - protein, 10 aa, Homo sapiens
  Table A; Target 93320; HLA-A*33:01; TUBA3C; ENSG00000198033; TAA
EPYNSILTTH

SEQ ID NO: 93321 - protein, 10 aa, Homo sapiens
  Table A; Target 93321; HLA-A*33:03; TUBA3C; ENSG00000198033; TAA
EPYNSILTTH

SEQ ID NO: 93322 - protein, 10 aa, Homo sapiens
  Table A; Target 93322; HLA-A*68:01; TUBA3C; ENSG00000198033; TAA
EPYNSILTTH

SEQ ID NO: 93323 - protein, 10 aa, Homo sapiens
  Table A; Target 93323; HLA-A*68:02; TUBA3C; ENSG00000198033; TAA
EPYNSILTTH

SEQ ID NO: 93324 - protein, 10 aa, Homo sapiens
  Table A; Target 93324; HLA-B*35:01; TUBA3C; ENSG00000198033; TAA
EPYNSILTTH

SEQ ID NO: 93325 - protein, 10 aa, Homo sapiens
  Table A; Target 93325; HLA-B*51:01; TUBA3C; ENSG00000198033; TAA
EPYNSILTTH

SEQ ID NO: 93326 - protein, 10 aa, Homo sapiens
  Table A; Target 93326; HLA-B*54:01; TUBA3C; ENSG00000198033; TAA
EPYNSILTTH

SEQ ID NO: 93327 - protein, 10 aa, Homo sapiens
  Table A; Target 93327; HLA-B*55:01; TUBA3C; ENSG00000198033; TAA
EPYNSILTTH

SEQ ID NO: 93328 - protein, 10 aa, Homo sapiens
  Table A; Target 93328; HLA-B*56:01; TUBA3C; ENSG00000198033; TAA
EPYNSILTTH

SEQ ID NO: 93329 - protein, 10 aa, Homo sapiens
  Table A; Target 93329; HLA-C*07:06; TUBA3C; ENSG00000198033; TAA
EPYNSILTTH

SEQ ID NO: 93330 - protein, 11 aa, Homo sapiens
  Table A; Target 93330; HLA-A*68:02; TUBA3C; ENSG00000198033; TAA
EPYNSILTTHT

SEQ ID NO: 93331 - protein, 11 aa, Homo sapiens
  Table A; Target 93331; HLA-B*54:01; TUBA3C; ENSG00000198033; TAA
EPYNSILTTHT

SEQ ID NO: 93332 - protein, 8 aa, Homo sapiens
  Table A; Target 93332; HLA-B*13:02; TUBA3C; ENSG00000198033; TAA
EQLSVAEI

SEQ ID NO: 93333 - protein, 8 aa, Homo sapiens
  Table A; Target 93333; HLA-B*38:01; TUBA3C; ENSG00000198033; TAA
EQLSVAEI

SEQ ID NO: 93334 - protein, 8 aa, Homo sapiens
  Table A; Target 93334; HLA-B*39:01; TUBA3C; ENSG00000198033; TAA
EQLSVAEI

SEQ ID NO: 93335 - protein, 8 aa, Homo sapiens
  Table A; Target 93335; HLA-B*51:01; TUBA3C; ENSG00000198033; TAA
EQLSVAEI

SEQ ID NO: 93336 - protein, 8 aa, Homo sapiens
  Table A; Target 93336; HLA-C*04:01; TUBA3C; ENSG00000198033; TAA
EQLSVAEI

SEQ ID NO: 93337 - protein, 8 aa, Homo sapiens
  Table A; Target 93337; HLA-C*07:01; TUBA3C; ENSG00000198033; TAA
EQLSVAEI

SEQ ID NO: 93338 - protein, 8 aa, Homo sapiens
  Table A; Target 93338; HLA-C*07:04; TUBA3C; ENSG00000198033; TAA
EQLSVAEI

SEQ ID NO: 93339 - protein, 10 aa, Homo sapiens
  Table A; Target 93339; HLA-C*04:01; TUBA3C; ENSG00000198033; TAA
EQLSVAEITN

SEQ ID NO: 93340 - protein, 10 aa, Homo sapiens
  Table A; Target 93340; HLA-C*07:01; TUBA3C; ENSG00000198033; TAA
EQLSVAEITN

SEQ ID NO: 93341 - protein, 9 aa, Homo sapiens
  Table A; Target 93341; HLA-B*27:02; TUBA3C; ENSG00000198033; TAA
ERLSVDYGK

SEQ ID NO: 93342 - protein, 9 aa, Homo sapiens
  Table A; Target 93342; HLA-B*27:05; TUBA3C; ENSG00000198033; TAA
ERLSVDYGK

SEQ ID NO: 93343 - protein, 10 aa, Homo sapiens
  Table A; Target 93343; HLA-B*27:02; TUBA3C; ENSG00000198033; TAA
ERLSVDYGKK

SEQ ID NO: 93344 - protein, 8 aa, Homo sapiens
  Table A; Target 93344; HLA-C*07:01; TUBA3C; ENSG00000198033; TAA
ERPTYTNL

SEQ ID NO: 93345 - protein, 8 aa, Homo sapiens
  Table A; Target 93345; HLA-C*07:02; TUBA3C; ENSG00000198033; TAA
ERPTYTNL

SEQ ID NO: 93346 - protein, 10 aa, Homo sapiens
  Table A; Target 93346; HLA-A*31:01; TUBA3C; ENSG00000198033; TAA
ETGAGKHVPR

SEQ ID NO: 93347 - protein, 10 aa, Homo sapiens
  Table A; Target 93347; HLA-A*33:01; TUBA3C; ENSG00000198033; TAA
ETGAGKHVPR

SEQ ID NO: 93348 - protein, 10 aa, Homo sapiens
  Table A; Target 93348; HLA-A*33:03; TUBA3C; ENSG00000198033; TAA
ETGAGKHVPR

SEQ ID NO: 93349 - protein, 10 aa, Homo sapiens
  Table A; Target 93349; HLA-A*68:01; TUBA3C; ENSG00000198033; TAA
ETGAGKHVPR

SEQ ID NO: 93350 - protein, 10 aa, Homo sapiens
  Table A; Target 93350; HLA-A*68:02; TUBA3C; ENSG00000198033; TAA
ETGAGKHVPR

SEQ ID NO: 93351 - protein, 10 aa, Homo sapiens
  Table A; Target 93351; HLA-C*07:06; TUBA3C; ENSG00000198033; TAA
ETGAGKHVPR

SEQ ID NO: 93352 - protein, 8 aa, Homo sapiens
  Table A; Target 93352; HLA-A*31:01; TUBA3C; ENSG00000198033; TAA
EVRTGTYR

SEQ ID NO: 93353 - protein, 8 aa, Homo sapiens
  Table A; Target 93353; HLA-A*33:01; TUBA3C; ENSG00000198033; TAA
EVRTGTYR

SEQ ID NO: 93354 - protein, 8 aa, Homo sapiens
  Table A; Target 93354; HLA-A*33:03; TUBA3C; ENSG00000198033; TAA
EVRTGTYR

SEQ ID NO: 93355 - protein, 8 aa, Homo sapiens
  Table A; Target 93355; HLA-A*68:01; TUBA3C; ENSG00000198033; TAA
EVRTGTYR

SEQ ID NO: 93356 - protein, 8 aa, Homo sapiens
  Table A; Target 93356; HLA-C*07:06; TUBA3C; ENSG00000198033; TAA
EVRTGTYR

SEQ ID NO: 93357 - protein, 10 aa, Homo sapiens
  Table A; Target 93357; HLA-A*25:01; TUBA3C; ENSG00000198033; TAA
EVRTGTYRQL

SEQ ID NO: 93358 - protein, 10 aa, Homo sapiens
  Table A; Target 93358; HLA-A*26:01; TUBA3C; ENSG00000198033; TAA
EVRTGTYRQL

SEQ ID NO: 93359 - protein, 10 aa, Homo sapiens
  Table A; Target 93359; HLA-A*33:01; TUBA3C; ENSG00000198033; TAA
EVRTGTYRQL

SEQ ID NO: 93360 - protein, 10 aa, Homo sapiens
  Table A; Target 93360; HLA-A*33:03; TUBA3C; ENSG00000198033; TAA
EVRTGTYRQL

SEQ ID NO: 93361 - protein, 11 aa, Homo sapiens
  Table A; Target 93361; HLA-B*57:01; TUBA3C; ENSG00000198033; TAA
EVRTGTYRQLF

SEQ ID NO: 93362 - protein, 9 aa, Homo sapiens
  Table A; Target 93362; HLA-A*01:01; TUBA3C; ENSG00000198033; TAA
FAIYPAPQV

SEQ ID NO: 93363 - protein, 9 aa, Homo sapiens
  Table A; Target 93363; HLA-A*02:01; TUBA3C; ENSG00000198033; TAA
FAIYPAPQV

SEQ ID NO: 93364 - protein, 9 aa, Homo sapiens
  Table A; Target 93364; HLA-A*02:03; TUBA3C; ENSG00000198033; TAA
FAIYPAPQV

SEQ ID NO: 93365 - protein, 9 aa, Homo sapiens
  Table A; Target 93365; HLA-A*02:04; TUBA3C; ENSG00000198033; TAA
FAIYPAPQV

SEQ ID NO: 93366 - protein, 9 aa, Homo sapiens
  Table A; Target 93366; HLA-A*02:07; TUBA3C; ENSG00000198033; TAA
FAIYPAPQV

SEQ ID NO: 93367 - protein, 9 aa, Homo sapiens
  Table A; Target 93367; HLA-A*23:01; TUBA3C; ENSG00000198033; TAA
FAIYPAPQV

SEQ ID NO: 93368 - protein, 9 aa, Homo sapiens
  Table A; Target 93368; HLA-A*24:02; TUBA3C; ENSG00000198033; TAA
FAIYPAPQV

SEQ ID NO: 93369 - protein, 9 aa, Homo sapiens
  Table A; Target 93369; HLA-A*25:01; TUBA3C; ENSG00000198033; TAA
FAIYPAPQV

SEQ ID NO: 93370 - protein, 9 aa, Homo sapiens
  Table A; Target 93370; HLA-A*26:01; TUBA3C; ENSG00000198033; TAA
FAIYPAPQV

SEQ ID NO: 93371 - protein, 9 aa, Homo sapiens
  Table A; Target 93371; HLA-A*30:01; TUBA3C; ENSG00000198033; TAA
FAIYPAPQV

SEQ ID NO: 93372 - protein, 9 aa, Homo sapiens
  Table A; Target 93372; HLA-A*32:01; TUBA3C; ENSG00000198033; TAA
FAIYPAPQV

SEQ ID NO: 93373 - protein, 9 aa, Homo sapiens
  Table A; Target 93373; HLA-A*68:01; TUBA3C; ENSG00000198033; TAA
FAIYPAPQV

SEQ ID NO: 93374 - protein, 9 aa, Homo sapiens
  Table A; Target 93374; HLA-A*68:02; TUBA3C; ENSG00000198033; TAA
FAIYPAPQV

SEQ ID NO: 93375 - protein, 9 aa, Homo sapiens
  Table A; Target 93375; HLA-B*07:02; TUBA3C; ENSG00000198033; TAA
FAIYPAPQV

SEQ ID NO: 93376 - protein, 9 aa, Homo sapiens
  Table A; Target 93376; HLA-B*08:01; TUBA3C; ENSG00000198033; TAA
FAIYPAPQV

SEQ ID NO: 93377 - protein, 9 aa, Homo sapiens
  Table A; Target 93377; HLA-B*13:02; TUBA3C; ENSG00000198033; TAA
FAIYPAPQV

SEQ ID NO: 93378 - protein, 9 aa, Homo sapiens
  Table A; Target 93378; HLA-B*15:01; TUBA3C; ENSG00000198033; TAA
FAIYPAPQV

SEQ ID NO: 93379 - protein, 9 aa, Homo sapiens
  Table A; Target 93379; HLA-B*15:03; TUBA3C; ENSG00000198033; TAA
FAIYPAPQV

SEQ ID NO: 93380 - protein, 9 aa, Homo sapiens
  Table A; Target 93380; HLA-B*27:02; TUBA3C; ENSG00000198033; TAA
FAIYPAPQV

SEQ ID NO: 93381 - protein, 9 aa, Homo sapiens
  Table A; Target 93381; HLA-B*27:05; TUBA3C; ENSG00000198033; TAA
FAIYPAPQV

SEQ ID NO: 93382 - protein, 9 aa, Homo sapiens
  Table A; Target 93382; HLA-B*35:01; TUBA3C; ENSG00000198033; TAA
FAIYPAPQV

SEQ ID NO: 93383 - protein, 9 aa, Homo sapiens
  Table A; Target 93383; HLA-B*35:03; TUBA3C; ENSG00000198033; TAA
FAIYPAPQV

SEQ ID NO: 93384 - protein, 9 aa, Homo sapiens
  Table A; Target 93384; HLA-B*38:01; TUBA3C; ENSG00000198033; TAA
FAIYPAPQV

SEQ ID NO: 93385 - protein, 9 aa, Homo sapiens
  Table A; Target 93385; HLA-B*39:01; TUBA3C; ENSG00000198033; TAA
FAIYPAPQV

SEQ ID NO: 93386 - protein, 9 aa, Homo sapiens
  Table A; Target 93386; HLA-B*40:01; TUBA3C; ENSG00000198033; TAA
FAIYPAPQV

SEQ ID NO: 93387 - protein, 9 aa, Homo sapiens
  Table A; Target 93387; HLA-B*40:02; TUBA3C; ENSG00000198033; TAA
FAIYPAPQV

SEQ ID NO: 93388 - protein, 9 aa, Homo sapiens
  Table A; Target 93388; HLA-B*46:01; TUBA3C; ENSG00000198033; TAA
FAIYPAPQV

SEQ ID NO: 93389 - protein, 9 aa, Homo sapiens
  Table A; Target 93389; HLA-B*49:01; TUBA3C; ENSG00000198033; TAA
FAIYPAPQV

SEQ ID NO: 93390 - protein, 9 aa, Homo sapiens
  Table A; Target 93390; HLA-B*51:01; TUBA3C; ENSG00000198033; TAA
FAIYPAPQV

SEQ ID NO: 93391 - protein, 9 aa, Homo sapiens
  Table A; Target 93391; HLA-B*54:01; TUBA3C; ENSG00000198033; TAA
FAIYPAPQV

SEQ ID NO: 93392 - protein, 9 aa, Homo sapiens
  Table A; Target 93392; HLA-B*55:01; TUBA3C; ENSG00000198033; TAA
FAIYPAPQV

SEQ ID NO: 93393 - protein, 9 aa, Homo sapiens
  Table A; Target 93393; HLA-B*56:01; TUBA3C; ENSG00000198033; TAA
FAIYPAPQV

SEQ ID NO: 93394 - protein, 9 aa, Homo sapiens
  Table A; Target 93394; HLA-B*57:01; TUBA3C; ENSG00000198033; TAA
FAIYPAPQV

SEQ ID NO: 93395 - protein, 9 aa, Homo sapiens
  Table A; Target 93395; HLA-B*58:01; TUBA3C; ENSG00000198033; TAA
FAIYPAPQV

SEQ ID NO: 93396 - protein, 9 aa, Homo sapiens
  Table A; Target 93396; HLA-C*01:02; TUBA3C; ENSG00000198033; TAA
FAIYPAPQV

SEQ ID NO: 93397 - protein, 9 aa, Homo sapiens
  Table A; Target 93397; HLA-C*02:02; TUBA3C; ENSG00000198033; TAA
FAIYPAPQV

SEQ ID NO: 93398 - protein, 9 aa, Homo sapiens
  Table A; Target 93398; HLA-C*03:03; TUBA3C; ENSG00000198033; TAA
FAIYPAPQV

SEQ ID NO: 93399 - protein, 9 aa, Homo sapiens
  Table A; Target 93399; HLA-C*03:04; TUBA3C; ENSG00000198033; TAA
FAIYPAPQV

SEQ ID NO: 93400 - protein, 9 aa, Homo sapiens
  Table A; Target 93400; HLA-C*04:01; TUBA3C; ENSG00000198033; TAA
FAIYPAPQV

SEQ ID NO: 93401 - protein, 9 aa, Homo sapiens
  Table A; Target 93401; HLA-C*05:01; TUBA3C; ENSG00000198033; TAA
FAIYPAPQV

SEQ ID NO: 93402 - protein, 9 aa, Homo sapiens
  Table A; Target 93402; HLA-C*06:02; TUBA3C; ENSG00000198033; TAA
FAIYPAPQV

SEQ ID NO: 93403 - protein, 9 aa, Homo sapiens
  Table A; Target 93403; HLA-C*07:01; TUBA3C; ENSG00000198033; TAA
FAIYPAPQV

SEQ ID NO: 93404 - protein, 9 aa, Homo sapiens
  Table A; Target 93404; HLA-C*07:02; TUBA3C; ENSG00000198033; TAA
FAIYPAPQV

SEQ ID NO: 93405 - protein, 9 aa, Homo sapiens
  Table A; Target 93405; HLA-C*07:04; TUBA3C; ENSG00000198033; TAA
FAIYPAPQV

SEQ ID NO: 93406 - protein, 9 aa, Homo sapiens
  Table A; Target 93406; HLA-C*07:06; TUBA3C; ENSG00000198033; TAA
FAIYPAPQV

SEQ ID NO: 93407 - protein, 9 aa, Homo sapiens
  Table A; Target 93407; HLA-C*12:03; TUBA3C; ENSG00000198033; TAA
FAIYPAPQV

SEQ ID NO: 93408 - protein, 9 aa, Homo sapiens
  Table A; Target 93408; HLA-C*14:02; TUBA3C; ENSG00000198033; TAA
FAIYPAPQV

SEQ ID NO: 93409 - protein, 9 aa, Homo sapiens
  Table A; Target 93409; HLA-C*16:01; TUBA3C; ENSG00000198033; TAA
FAIYPAPQV

SEQ ID NO: 93410 - protein, 9 aa, Homo sapiens
  Table A; Target 93410; HLA-C*16:02; TUBA3C; ENSG00000198033; TAA
FAIYPAPQV

SEQ ID NO: 93411 - protein, 9 aa, Homo sapiens
  Table A; Target 93411; HLA-C*16:04; TUBA3C; ENSG00000198033; TAA
FAIYPAPQV

SEQ ID NO: 93412 - protein, 10 aa, Homo sapiens
  Table A; Target 93412; HLA-B*39:01; TUBA3C; ENSG00000198033; TAA
FAIYPAPQVS

SEQ ID NO: 93413 - protein, 10 aa, Homo sapiens
  Table A; Target 93413; HLA-B*54:01; TUBA3C; ENSG00000198033; TAA
FAIYPAPQVS

SEQ ID NO: 93414 - protein, 10 aa, Homo sapiens
  Table A; Target 93414; HLA-C*07:02; TUBA3C; ENSG00000198033; TAA
FAIYPAPQVS

SEQ ID NO: 93415 - protein, 11 aa, Homo sapiens
  Table A; Target 93415; HLA-A*68:02; TUBA3C; ENSG00000198033; TAA
FAIYPAPQVST

SEQ ID NO: 93416 - protein, 11 aa, Homo sapiens
  Table A; Target 93416; HLA-B*54:01; TUBA3C; ENSG00000198033; TAA
FAIYPAPQVST

SEQ ID NO: 93417 - protein, 8 aa, Homo sapiens
  Table A; Target 93417; HLA-A*33:03; TUBA3C; ENSG00000198033; TAA
FASLLMER

SEQ ID NO: 93418 - protein, 8 aa, Homo sapiens
  Table A; Target 93418; HLA-B*54:01; TUBA3C; ENSG00000198033; TAA
FASLLMER

SEQ ID NO: 93419 - protein, 9 aa, Homo sapiens
  Table A; Target 93419; HLA-A*02:01; TUBA3C; ENSG00000198033; TAA
FASLLMERL

SEQ ID NO: 93420 - protein, 9 aa, Homo sapiens
  Table A; Target 93420; HLA-A*02:04; TUBA3C; ENSG00000198033; TAA
FASLLMERL

SEQ ID NO: 93421 - protein, 9 aa, Homo sapiens
  Table A; Target 93421; HLA-A*02:07; TUBA3C; ENSG00000198033; TAA
FASLLMERL

SEQ ID NO: 93422 - protein, 9 aa, Homo sapiens
  Table A; Target 93422; HLA-A*24:02; TUBA3C; ENSG00000198033; TAA
FASLLMERL

SEQ ID NO: 93423 - protein, 9 aa, Homo sapiens
  Table A; Target 93423; HLA-A*68:02; TUBA3C; ENSG00000198033; TAA
FASLLMERL

SEQ ID NO: 93424 - protein, 9 aa, Homo sapiens
  Table A; Target 93424; HLA-B*13:02; TUBA3C; ENSG00000198033; TAA
FASLLMERL

SEQ ID NO: 93425 - protein, 9 aa, Homo sapiens
  Table A; Target 93425; HLA-B*27:05; TUBA3C; ENSG00000198033; TAA
FASLLMERL

SEQ ID NO: 93426 - protein, 9 aa, Homo sapiens
  Table A; Target 93426; HLA-B*35:01; TUBA3C; ENSG00000198033; TAA
FASLLMERL

SEQ ID NO: 93427 - protein, 9 aa, Homo sapiens
  Table A; Target 93427; HLA-B*35:03; TUBA3C; ENSG00000198033; TAA
FASLLMERL

SEQ ID NO: 93428 - protein, 9 aa, Homo sapiens
  Table A; Target 93428; HLA-B*38:01; TUBA3C; ENSG00000198033; TAA
FASLLMERL

SEQ ID NO: 93429 - protein, 9 aa, Homo sapiens
  Table A; Target 93429; HLA-B*54:01; TUBA3C; ENSG00000198033; TAA
FASLLMERL

SEQ ID NO: 93430 - protein, 9 aa, Homo sapiens
  Table A; Target 93430; HLA-C*02:02; TUBA3C; ENSG00000198033; TAA
FASLLMERL

SEQ ID NO: 93431 - protein, 9 aa, Homo sapiens
  Table A; Target 93431; HLA-C*04:01; TUBA3C; ENSG00000198033; TAA
FASLLMERL

SEQ ID NO: 93432 - protein, 9 aa, Homo sapiens
  Table A; Target 93432; HLA-C*06:02; TUBA3C; ENSG00000198033; TAA
FASLLMERL

SEQ ID NO: 93433 - protein, 9 aa, Homo sapiens
  Table A; Target 93433; HLA-C*07:01; TUBA3C; ENSG00000198033; TAA
FASLLMERL

SEQ ID NO: 93434 - protein, 9 aa, Homo sapiens
  Table A; Target 93434; HLA-C*07:02; TUBA3C; ENSG00000198033; TAA
FASLLMERL

SEQ ID NO: 93435 - protein, 9 aa, Homo sapiens
  Table A; Target 93435; HLA-C*12:03; TUBA3C; ENSG00000198033; TAA
FASLLMERL

SEQ ID NO: 93436 - protein, 9 aa, Homo sapiens
  Table A; Target 93436; HLA-C*16:04; TUBA3C; ENSG00000198033; TAA
FASLLMERL

SEQ ID NO: 93437 - protein, 9 aa, Homo sapiens
  Table A; Target 93437; HLA-A*30:01; TUBA3C; ENSG00000198033; TAA
FDGALNVDL

SEQ ID NO: 93438 - protein, 9 aa, Homo sapiens
  Table A; Target 93438; HLA-B*35:03; TUBA3C; ENSG00000198033; TAA
FDGALNVDL

SEQ ID NO: 93439 - protein, 9 aa, Homo sapiens
  Table A; Target 93439; HLA-B*38:01; TUBA3C; ENSG00000198033; TAA
FDGALNVDL

SEQ ID NO: 93440 - protein, 9 aa, Homo sapiens
  Table A; Target 93440; HLA-B*40:01; TUBA3C; ENSG00000198033; TAA
FDGALNVDL

SEQ ID NO: 93441 - protein, 9 aa, Homo sapiens
  Table A; Target 93441; HLA-B*40:02; TUBA3C; ENSG00000198033; TAA
FDGALNVDL

SEQ ID NO: 93442 - protein, 9 aa, Homo sapiens
  Table A; Target 93442; HLA-C*06:02; TUBA3C; ENSG00000198033; TAA
FDGALNVDL

SEQ ID NO: 93443 - protein, 9 aa, Homo sapiens
  Table A; Target 93443; HLA-C*07:01; TUBA3C; ENSG00000198033; TAA
FDGALNVDL

SEQ ID NO: 93444 - protein, 9 aa, Homo sapiens
  Table A; Target 93444; HLA-C*07:02; TUBA3C; ENSG00000198033; TAA
FDGALNVDL

SEQ ID NO: 93445 - protein, 9 aa, Homo sapiens
  Table A; Target 93445; HLA-C*07:04; TUBA3C; ENSG00000198033; TAA
FDGALNVDL

SEQ ID NO: 93446 - protein, 9 aa, Homo sapiens
  Table A; Target 93446; HLA-C*12:03; TUBA3C; ENSG00000198033; TAA
FDGALNVDL

SEQ ID NO: 93447 - protein, 8 aa, Homo sapiens
  Table A; Target 93447; HLA-B*13:02; TUBA3C; ENSG00000198033; TAA
FEPANQMV

SEQ ID NO: 93448 - protein, 8 aa, Homo sapiens
  Table A; Target 93448; HLA-B*39:01; TUBA3C; ENSG00000198033; TAA
FEPANQMV

SEQ ID NO: 93449 - protein, 8 aa, Homo sapiens
  Table A; Target 93449; HLA-B*40:02; TUBA3C; ENSG00000198033; TAA
FEPANQMV

SEQ ID NO: 93450 - protein, 8 aa, Homo sapiens
  Table A; Target 93450; HLA-B*49:01; TUBA3C; ENSG00000198033; TAA
FEPANQMV

SEQ ID NO: 93451 - protein, 8 aa, Homo sapiens
  Table A; Target 93451; HLA-B*51:01; TUBA3C; ENSG00000198033; TAA
FEPANQMV

SEQ ID NO: 93452 - protein, 8 aa, Homo sapiens
  Table A; Target 93452; HLA-C*04:01; TUBA3C; ENSG00000198033; TAA
FEPANQMV

SEQ ID NO: 93453 - protein, 8 aa, Homo sapiens
  Table A; Target 93453; HLA-C*06:02; TUBA3C; ENSG00000198033; TAA
FEPANQMV

SEQ ID NO: 93454 - protein, 8 aa, Homo sapiens
  Table A; Target 93454; HLA-C*07:01; TUBA3C; ENSG00000198033; TAA
FEPANQMV

SEQ ID NO: 93455 - protein, 8 aa, Homo sapiens
  Table A; Target 93455; HLA-C*07:02; TUBA3C; ENSG00000198033; TAA
FEPANQMV

SEQ ID NO: 93456 - protein, 9 aa, Homo sapiens
  Table A; Target 93456; HLA-A*03:01; TUBA3C; ENSG00000198033; TAA
FEPANQMVK

SEQ ID NO: 93457 - protein, 9 aa, Homo sapiens
  Table A; Target 93457; HLA-A*11:01; TUBA3C; ENSG00000198033; TAA
FEPANQMVK

SEQ ID NO: 93458 - protein, 9 aa, Homo sapiens
  Table A; Target 93458; HLA-B*27:02; TUBA3C; ENSG00000198033; TAA
FEPANQMVK

SEQ ID NO: 93459 - protein, 9 aa, Homo sapiens
  Table A; Target 93459; HLA-B*27:05; TUBA3C; ENSG00000198033; TAA
FEPANQMVK

SEQ ID NO: 93460 - protein, 9 aa, Homo sapiens
  Table A; Target 93460; HLA-B*40:01; TUBA3C; ENSG00000198033; TAA
FEPANQMVK

SEQ ID NO: 93461 - protein, 9 aa, Homo sapiens
  Table A; Target 93461; HLA-B*40:02; TUBA3C; ENSG00000198033; TAA
FEPANQMVK

SEQ ID NO: 93462 - protein, 9 aa, Homo sapiens
  Table A; Target 93462; HLA-B*49:01; TUBA3C; ENSG00000198033; TAA
FEPANQMVK

SEQ ID NO: 93463 - protein, 9 aa, Homo sapiens
  Table A; Target 93463; HLA-B*54:01; TUBA3C; ENSG00000198033; TAA
FEPANQMVK

SEQ ID NO: 93464 - protein, 9 aa, Homo sapiens
  Table A; Target 93464; HLA-C*02:02; TUBA3C; ENSG00000198033; TAA
FEPANQMVK

SEQ ID NO: 93465 - protein, 9 aa, Homo sapiens
  Table A; Target 93465; HLA-C*04:01; TUBA3C; ENSG00000198033; TAA
FEPANQMVK

SEQ ID NO: 93466 - protein, 9 aa, Homo sapiens
  Table A; Target 93466; HLA-C*06:02; TUBA3C; ENSG00000198033; TAA
FEPANQMVK

SEQ ID NO: 93467 - protein, 9 aa, Homo sapiens
  Table A; Target 93467; HLA-C*07:01; TUBA3C; ENSG00000198033; TAA
FEPANQMVK

SEQ ID NO: 93468 - protein, 9 aa, Homo sapiens
  Table A; Target 93468; HLA-C*07:02; TUBA3C; ENSG00000198033; TAA
FEPANQMVK

SEQ ID NO: 93469 - protein, 9 aa, Homo sapiens
  Table A; Target 93469; HLA-C*07:04; TUBA3C; ENSG00000198033; TAA
FEPANQMVK

SEQ ID NO: 93470 - protein, 9 aa, Homo sapiens
  Table A; Target 93470; HLA-C*07:06; TUBA3C; ENSG00000198033; TAA
FEPANQMVK

SEQ ID NO: 93471 - protein, 9 aa, Homo sapiens
  Table A; Target 93471; HLA-C*12:03; TUBA3C; ENSG00000198033; TAA
FEPANQMVK

SEQ ID NO: 93472 - protein, 10 aa, Homo sapiens
  Table A; Target 93472; HLA-A*30:01; TUBA3C; ENSG00000198033; TAA
FEPANQMVKC

SEQ ID NO: 93473 - protein, 10 aa, Homo sapiens
  Table A; Target 93473; HLA-B*40:02; TUBA3C; ENSG00000198033; TAA
FEPANQMVKC

SEQ ID NO: 93474 - protein, 10 aa, Homo sapiens
  Table A; Target 93474; HLA-B*49:01; TUBA3C; ENSG00000198033; TAA
FEPANQMVKC

SEQ ID NO: 93475 - protein, 8 aa, Homo sapiens
  Table A; Target 93475; HLA-C*04:01; TUBA3C; ENSG00000198033; TAA
FFSETGAG

SEQ ID NO: 93476 - protein, 9 aa, Homo sapiens
  Table A; Target 93476; HLA-A*29:02; TUBA3C; ENSG00000198033; TAA
FFSETGAGK

SEQ ID NO: 93477 - protein, 9 aa, Homo sapiens
  Table A; Target 93477; HLA-A*33:03; TUBA3C; ENSG00000198033; TAA
FFSETGAGK

SEQ ID NO: 93478 - protein, 9 aa, Homo sapiens
  Table A; Target 93478; HLA-B*27:05; TUBA3C; ENSG00000198033; TAA
FFSETGAGK

SEQ ID NO: 93479 - protein, 9 aa, Homo sapiens
  Table A; Target 93479; HLA-C*04:01; TUBA3C; ENSG00000198033; TAA
FFSETGAGK

SEQ ID NO: 93480 - protein, 9 aa, Homo sapiens
  Table A; Target 93480; HLA-C*14:02; TUBA3C; ENSG00000198033; TAA
FFSETGAGK

SEQ ID NO: 93481 - protein, 11 aa, Homo sapiens
  Table A; Target 93481; HLA-C*04:01; TUBA3C; ENSG00000198033; TAA
FFSETGAGKHV

SEQ ID NO: 93482 - protein, 8 aa, Homo sapiens
  Table A; Target 93482; HLA-C*04:01; TUBA3C; ENSG00000198033; TAA
FGGGTGSG

SEQ ID NO: 93483 - protein, 8 aa, Homo sapiens
  Table A; Target 93483; HLA-C*06:02; TUBA3C; ENSG00000198033; TAA
FGGGTGSG

SEQ ID NO: 93484 - protein, 8 aa, Homo sapiens
  Table A; Target 93484; HLA-C*07:01; TUBA3C; ENSG00000198033; TAA
FGGGTGSG

SEQ ID NO: 93485 - protein, 8 aa, Homo sapiens
  Table A; Target 93485; HLA-C*07:02; TUBA3C; ENSG00000198033; TAA
FGGGTGSG

SEQ ID NO: 93486 - protein, 8 aa, Homo sapiens
  Table A; Target 93486; HLA-C*12:03; TUBA3C; ENSG00000198033; TAA
FGGGTGSG

SEQ ID NO: 93487 - protein, 9 aa, Homo sapiens
  Table A; Target 93487; HLA-A*01:01; TUBA3C; ENSG00000198033; TAA
FGGGTGSGF

SEQ ID NO: 93488 - protein, 9 aa, Homo sapiens
  Table A; Target 93488; HLA-A*23:01; TUBA3C; ENSG00000198033; TAA
FGGGTGSGF

SEQ ID NO: 93489 - protein, 9 aa, Homo sapiens
  Table A; Target 93489; HLA-A*25:01; TUBA3C; ENSG00000198033; TAA
FGGGTGSGF

SEQ ID NO: 93490 - protein, 9 aa, Homo sapiens
  Table A; Target 93490; HLA-A*26:01; TUBA3C; ENSG00000198033; TAA
FGGGTGSGF

SEQ ID NO: 93491 - protein, 9 aa, Homo sapiens
  Table A; Target 93491; HLA-A*29:02; TUBA3C; ENSG00000198033; TAA
FGGGTGSGF

SEQ ID NO: 93492 - protein, 9 aa, Homo sapiens
  Table A; Target 93492; HLA-A*30:02; TUBA3C; ENSG00000198033; TAA
FGGGTGSGF

SEQ ID NO: 93493 - protein, 9 aa, Homo sapiens
  Table A; Target 93493; HLA-A*32:01; TUBA3C; ENSG00000198033; TAA
FGGGTGSGF

SEQ ID NO: 93494 - protein, 9 aa, Homo sapiens
  Table A; Target 93494; HLA-B*07:02; TUBA3C; ENSG00000198033; TAA
FGGGTGSGF

SEQ ID NO: 93495 - protein, 9 aa, Homo sapiens
  Table A; Target 93495; HLA-B*15:01; TUBA3C; ENSG00000198033; TAA
FGGGTGSGF

SEQ ID NO: 93496 - protein, 9 aa, Homo sapiens
  Table A; Target 93496; HLA-B*15:03; TUBA3C; ENSG00000198033; TAA
FGGGTGSGF

SEQ ID NO: 93497 - protein, 9 aa, Homo sapiens
  Table A; Target 93497; HLA-B*27:02; TUBA3C; ENSG00000198033; TAA
FGGGTGSGF

SEQ ID NO: 93498 - protein, 9 aa, Homo sapiens
  Table A; Target 93498; HLA-B*27:05; TUBA3C; ENSG00000198033; TAA
FGGGTGSGF

SEQ ID NO: 93499 - protein, 9 aa, Homo sapiens
  Table A; Target 93499; HLA-B*35:01; TUBA3C; ENSG00000198033; TAA
FGGGTGSGF

SEQ ID NO: 93500 - protein, 9 aa, Homo sapiens
  Table A; Target 93500; HLA-B*35:03; TUBA3C; ENSG00000198033; TAA
FGGGTGSGF

SEQ ID NO: 93501 - protein, 9 aa, Homo sapiens
  Table A; Target 93501; HLA-B*38:01; TUBA3C; ENSG00000198033; TAA
FGGGTGSGF

SEQ ID NO: 93502 - protein, 9 aa, Homo sapiens
  Table A; Target 93502; HLA-B*39:01; TUBA3C; ENSG00000198033; TAA
FGGGTGSGF

SEQ ID NO: 93503 - protein, 9 aa, Homo sapiens
  Table A; Target 93503; HLA-B*40:02; TUBA3C; ENSG00000198033; TAA
FGGGTGSGF

SEQ ID NO: 93504 - protein, 9 aa, Homo sapiens
  Table A; Target 93504; HLA-B*46:01; TUBA3C; ENSG00000198033; TAA
FGGGTGSGF

SEQ ID NO: 93505 - protein, 9 aa, Homo sapiens
  Table A; Target 93505; HLA-B*55:01; TUBA3C; ENSG00000198033; TAA
FGGGTGSGF

SEQ ID NO: 93506 - protein, 9 aa, Homo sapiens
  Table A; Target 93506; HLA-B*58:01; TUBA3C; ENSG00000198033; TAA
FGGGTGSGF

SEQ ID NO: 93507 - protein, 9 aa, Homo sapiens
  Table A; Target 93507; HLA-C*01:02; TUBA3C; ENSG00000198033; TAA
FGGGTGSGF

SEQ ID NO: 93508 - protein, 9 aa, Homo sapiens
  Table A; Target 93508; HLA-C*02:02; TUBA3C; ENSG00000198033; TAA
FGGGTGSGF

SEQ ID NO: 93509 - protein, 9 aa, Homo sapiens
  Table A; Target 93509; HLA-C*03:03; TUBA3C; ENSG00000198033; TAA
FGGGTGSGF

SEQ ID NO: 93510 - protein, 9 aa, Homo sapiens
  Table A; Target 93510; HLA-C*03:04; TUBA3C; ENSG00000198033; TAA
FGGGTGSGF

SEQ ID NO: 93511 - protein, 9 aa, Homo sapiens
  Table A; Target 93511; HLA-C*04:01; TUBA3C; ENSG00000198033; TAA
FGGGTGSGF

SEQ ID NO: 93512 - protein, 9 aa, Homo sapiens
  Table A; Target 93512; HLA-C*05:01; TUBA3C; ENSG00000198033; TAA
FGGGTGSGF

SEQ ID NO: 93513 - protein, 9 aa, Homo sapiens
  Table A; Target 93513; HLA-C*06:02; TUBA3C; ENSG00000198033; TAA
FGGGTGSGF

SEQ ID NO: 93514 - protein, 9 aa, Homo sapiens
  Table A; Target 93514; HLA-C*07:01; TUBA3C; ENSG00000198033; TAA
FGGGTGSGF

SEQ ID NO: 93515 - protein, 9 aa, Homo sapiens
  Table A; Target 93515; HLA-C*07:02; TUBA3C; ENSG00000198033; TAA
FGGGTGSGF

SEQ ID NO: 93516 - protein, 9 aa, Homo sapiens
  Table A; Target 93516; HLA-C*07:04; TUBA3C; ENSG00000198033; TAA
FGGGTGSGF

SEQ ID NO: 93517 - protein, 9 aa, Homo sapiens
  Table A; Target 93517; HLA-C*12:03; TUBA3C; ENSG00000198033; TAA
FGGGTGSGF

SEQ ID NO: 93518 - protein, 9 aa, Homo sapiens
  Table A; Target 93518; HLA-C*14:02; TUBA3C; ENSG00000198033; TAA
FGGGTGSGF

SEQ ID NO: 93519 - protein, 9 aa, Homo sapiens
  Table A; Target 93519; HLA-C*16:01; TUBA3C; ENSG00000198033; TAA
FGGGTGSGF

SEQ ID NO: 93520 - protein, 9 aa, Homo sapiens
  Table A; Target 93520; HLA-C*16:02; TUBA3C; ENSG00000198033; TAA
FGGGTGSGF

SEQ ID NO: 93521 - protein, 9 aa, Homo sapiens
  Table A; Target 93521; HLA-C*16:04; TUBA3C; ENSG00000198033; TAA
FGGGTGSGF

SEQ ID NO: 93522 - protein, 10 aa, Homo sapiens
  Table A; Target 93522; HLA-B*27:05; TUBA3C; ENSG00000198033; TAA
FGGGTGSGFA

SEQ ID NO: 93523 - protein, 10 aa, Homo sapiens
  Table A; Target 93523; HLA-C*04:01; TUBA3C; ENSG00000198033; TAA
FGGGTGSGFA

SEQ ID NO: 93524 - protein, 10 aa, Homo sapiens
  Table A; Target 93524; HLA-C*06:02; TUBA3C; ENSG00000198033; TAA
FGGGTGSGFA

SEQ ID NO: 93525 - protein, 10 aa, Homo sapiens
  Table A; Target 93525; HLA-C*07:01; TUBA3C; ENSG00000198033; TAA
FGGGTGSGFA

SEQ ID NO: 93526 - protein, 10 aa, Homo sapiens
  Table A; Target 93526; HLA-C*07:02; TUBA3C; ENSG00000198033; TAA
FGGGTGSGFA

SEQ ID NO: 93527 - protein, 11 aa, Homo sapiens
  Table A; Target 93527; HLA-B*07:02; TUBA3C; ENSG00000198033; TAA
FGGGTGSGFAS

SEQ ID NO: 93528 - protein, 11 aa, Homo sapiens
  Table A; Target 93528; HLA-B*27:02; TUBA3C; ENSG00000198033; TAA
FGGGTGSGFAS

SEQ ID NO: 93529 - protein, 11 aa, Homo sapiens
  Table A; Target 93529; HLA-B*27:05; TUBA3C; ENSG00000198033; TAA
FGGGTGSGFAS

SEQ ID NO: 93530 - protein, 11 aa, Homo sapiens
  Table A; Target 93530; HLA-C*01:02; TUBA3C; ENSG00000198033; TAA
FGGGTGSGFAS

SEQ ID NO: 93531 - protein, 11 aa, Homo sapiens
  Table A; Target 93531; HLA-C*03:03; TUBA3C; ENSG00000198033; TAA
FGGGTGSGFAS

SEQ ID NO: 93532 - protein, 11 aa, Homo sapiens
  Table A; Target 93532; HLA-C*04:01; TUBA3C; ENSG00000198033; TAA
FGGGTGSGFAS

SEQ ID NO: 93533 - protein, 11 aa, Homo sapiens
  Table A; Target 93533; HLA-C*06:02; TUBA3C; ENSG00000198033; TAA
FGGGTGSGFAS

SEQ ID NO: 93534 - protein, 11 aa, Homo sapiens
  Table A; Target 93534; HLA-C*07:01; TUBA3C; ENSG00000198033; TAA
FGGGTGSGFAS

SEQ ID NO: 93535 - protein, 11 aa, Homo sapiens
  Table A; Target 93535; HLA-C*07:02; TUBA3C; ENSG00000198033; TAA
FGGGTGSGFAS

SEQ ID NO: 93536 - protein, 11 aa, Homo sapiens
  Table A; Target 93536; HLA-C*07:04; TUBA3C; ENSG00000198033; TAA
FGGGTGSGFAS

SEQ ID NO: 93537 - protein, 11 aa, Homo sapiens
  Table A; Target 93537; HLA-C*12:03; TUBA3C; ENSG00000198033; TAA
FGGGTGSGFAS

SEQ ID NO: 93538 - protein, 11 aa, Homo sapiens
  Table A; Target 93538; HLA-C*14:02; TUBA3C; ENSG00000198033; TAA
FGGGTGSGFAS

SEQ ID NO: 93539 - protein, 9 aa, Homo sapiens
  Table A; Target 93539; HLA-C*07:01; TUBA3C; ENSG00000198033; TAA
FHPEQLITG

SEQ ID NO: 93540 - protein, 9 aa, Homo sapiens
  Table A; Target 93540; HLA-C*07:02; TUBA3C; ENSG00000198033; TAA
FHPEQLITG

SEQ ID NO: 93541 - protein, 10 aa, Homo sapiens
  Table A; Target 93541; HLA-A*68:02; TUBA3C; ENSG00000198033; TAA
FHPEQLITGK

SEQ ID NO: 93542 - protein, 10 aa, Homo sapiens
  Table A; Target 93542; HLA-B*07:02; TUBA3C; ENSG00000198033; TAA
FHPEQLITGK

SEQ ID NO: 93543 - protein, 10 aa, Homo sapiens
  Table A; Target 93543; HLA-B*27:02; TUBA3C; ENSG00000198033; TAA
FHPEQLITGK

SEQ ID NO: 93544 - protein, 10 aa, Homo sapiens
  Table A; Target 93544; HLA-B*27:05; TUBA3C; ENSG00000198033; TAA
FHPEQLITGK

SEQ ID NO: 93545 - protein, 10 aa, Homo sapiens
  Table A; Target 93545; HLA-C*06:02; TUBA3C; ENSG00000198033; TAA
FHPEQLITGK

SEQ ID NO: 93546 - protein, 10 aa, Homo sapiens
  Table A; Target 93546; HLA-C*07:01; TUBA3C; ENSG00000198033; TAA
FHPEQLITGK

SEQ ID NO: 93547 - protein, 10 aa, Homo sapiens
  Table A; Target 93547; HLA-C*07:02; TUBA3C; ENSG00000198033; TAA
FHPEQLITGK

SEQ ID NO: 93548 - protein, 9 aa, Homo sapiens
  Table A; Target 93548; HLA-B*38:01; TUBA3C; ENSG00000198033; TAA
FHSFGGGTG

SEQ ID NO: 93549 - protein, 9 aa, Homo sapiens
  Table A; Target 93549; HLA-B*39:01; TUBA3C; ENSG00000198033; TAA
FHSFGGGTG

SEQ ID NO: 93550 - protein, 10 aa, Homo sapiens
  Table A; Target 93550; HLA-B*39:01; TUBA3C; ENSG00000198033; TAA
FHSFGGGTGS

SEQ ID NO: 93551 - protein, 11 aa, Homo sapiens
  Table A; Target 93551; HLA-B*39:01; TUBA3C; ENSG00000198033; TAA
FHSFGGGTGSG

SEQ ID NO: 93552 - protein, 8 aa, Homo sapiens
  Table A; Target 93552; HLA-B*39:01; TUBA3C; ENSG00000198033; TAA
FMVDNEAI

SEQ ID NO: 93553 - protein, 8 aa, Homo sapiens
  Table A; Target 93553; HLA-B*46:01; TUBA3C; ENSG00000198033; TAA
FMVDNEAI

SEQ ID NO: 93554 - protein, 8 aa, Homo sapiens
  Table A; Target 93554; HLA-B*55:01; TUBA3C; ENSG00000198033; TAA
FMVDNEAI

SEQ ID NO: 93555 - protein, 9 aa, Homo sapiens
  Table A; Target 93555; HLA-A*01:01; TUBA3C; ENSG00000198033; TAA
FMVDNEAIY

SEQ ID NO: 93556 - protein, 9 aa, Homo sapiens
  Table A; Target 93556; HLA-A*25:01; TUBA3C; ENSG00000198033; TAA
FMVDNEAIY

SEQ ID NO: 93557 - protein, 9 aa, Homo sapiens
  Table A; Target 93557; HLA-A*26:01; TUBA3C; ENSG00000198033; TAA
FMVDNEAIY

SEQ ID NO: 93558 - protein, 9 aa, Homo sapiens
  Table A; Target 93558; HLA-A*29:02; TUBA3C; ENSG00000198033; TAA
FMVDNEAIY

SEQ ID NO: 93559 - protein, 9 aa, Homo sapiens
  Table A; Target 93559; HLA-A*30:02; TUBA3C; ENSG00000198033; TAA
FMVDNEAIY

SEQ ID NO: 93560 - protein, 9 aa, Homo sapiens
  Table A; Target 93560; HLA-B*15:01; TUBA3C; ENSG00000198033; TAA
FMVDNEAIY

SEQ ID NO: 93561 - protein, 9 aa, Homo sapiens
  Table A; Target 93561; HLA-B*15:03; TUBA3C; ENSG00000198033; TAA
FMVDNEAIY

SEQ ID NO: 93562 - protein, 9 aa, Homo sapiens
  Table A; Target 93562; HLA-B*35:01; TUBA3C; ENSG00000198033; TAA
FMVDNEAIY

SEQ ID NO: 93563 - protein, 9 aa, Homo sapiens
  Table A; Target 93563; HLA-B*39:01; TUBA3C; ENSG00000198033; TAA
FMVDNEAIY

SEQ ID NO: 93564 - protein, 9 aa, Homo sapiens
  Table A; Target 93564; HLA-B*46:01; TUBA3C; ENSG00000198033; TAA
FMVDNEAIY

SEQ ID NO: 93565 - protein, 9 aa, Homo sapiens
  Table A; Target 93565; HLA-B*55:01; TUBA3C; ENSG00000198033; TAA
FMVDNEAIY

SEQ ID NO: 93566 - protein, 9 aa, Homo sapiens
  Table A; Target 93566; HLA-C*02:02; TUBA3C; ENSG00000198033; TAA
FMVDNEAIY

SEQ ID NO: 93567 - protein, 9 aa, Homo sapiens
  Table A; Target 93567; HLA-C*03:03; TUBA3C; ENSG00000198033; TAA
FMVDNEAIY

SEQ ID NO: 93568 - protein, 9 aa, Homo sapiens
  Table A; Target 93568; HLA-C*07:01; TUBA3C; ENSG00000198033; TAA
FMVDNEAIY

SEQ ID NO: 93569 - protein, 9 aa, Homo sapiens
  Table A; Target 93569; HLA-C*07:04; TUBA3C; ENSG00000198033; TAA
FMVDNEAIY

SEQ ID NO: 93570 - protein, 9 aa, Homo sapiens
  Table A; Target 93570; HLA-C*12:03; TUBA3C; ENSG00000198033; TAA
FMVDNEAIY

SEQ ID NO: 93571 - protein, 9 aa, Homo sapiens
  Table A; Target 93571; HLA-C*14:02; TUBA3C; ENSG00000198033; TAA
FMVDNEAIY

SEQ ID NO: 93572 - protein, 9 aa, Homo sapiens
  Table A; Target 93572; HLA-C*16:01; TUBA3C; ENSG00000198033; TAA
FMVDNEAIY

SEQ ID NO: 93573 - protein, 11 aa, Homo sapiens
  Table A; Target 93573; HLA-A*02:01; TUBA3C; ENSG00000198033; TAA
FMVDNEAIYDI

SEQ ID NO: 93574 - protein, 11 aa, Homo sapiens
  Table A; Target 93574; HLA-A*02:04; TUBA3C; ENSG00000198033; TAA
FMVDNEAIYDI

SEQ ID NO: 93575 - protein, 11 aa, Homo sapiens
  Table A; Target 93575; HLA-A*02:07; TUBA3C; ENSG00000198033; TAA
FMVDNEAIYDI

SEQ ID NO: 93576 - protein, 11 aa, Homo sapiens
  Table A; Target 93576; HLA-A*68:02; TUBA3C; ENSG00000198033; TAA
FMVDNEAIYDI

SEQ ID NO: 93577 - protein, 8 aa, Homo sapiens
  Table A; Target 93577; HLA-B*54:01; TUBA3C; ENSG00000198033; TAA
FPLATYAP

SEQ ID NO: 93578 - protein, 8 aa, Homo sapiens
  Table A; Target 93578; HLA-B*56:01; TUBA3C; ENSG00000198033; TAA
FPLATYAP

SEQ ID NO: 93579 - protein, 9 aa, Homo sapiens
  Table A; Target 93579; HLA-B*35:01; TUBA3C; ENSG00000198033; TAA
FPLATYAPV

SEQ ID NO: 93580 - protein, 9 aa, Homo sapiens
  Table A; Target 93580; HLA-B*35:03; TUBA3C; ENSG00000198033; TAA
FPLATYAPV

SEQ ID NO: 93581 - protein, 9 aa, Homo sapiens
  Table A; Target 93581; HLA-B*51:01; TUBA3C; ENSG00000198033; TAA
FPLATYAPV

SEQ ID NO: 93582 - protein, 9 aa, Homo sapiens
  Table A; Target 93582; HLA-B*54:01; TUBA3C; ENSG00000198033; TAA
FPLATYAPV

SEQ ID NO: 93583 - protein, 9 aa, Homo sapiens
  Table A; Target 93583; HLA-B*56:01; TUBA3C; ENSG00000198033; TAA
FPLATYAPV

SEQ ID NO: 93584 - protein, 9 aa, Homo sapiens
  Table A; Target 93584; HLA-C*04:01; TUBA3C; ENSG00000198033; TAA
FPLATYAPV

SEQ ID NO: 93585 - protein, 10 aa, Homo sapiens
  Table A; Target 93585; HLA-A*23:01; TUBA3C; ENSG00000198033; TAA
FPLATYAPVI

SEQ ID NO: 93586 - protein, 10 aa, Homo sapiens
  Table A; Target 93586; HLA-A*68:02; TUBA3C; ENSG00000198033; TAA
FPLATYAPVI

SEQ ID NO: 93587 - protein, 10 aa, Homo sapiens
  Table A; Target 93587; HLA-B*07:02; TUBA3C; ENSG00000198033; TAA
FPLATYAPVI

SEQ ID NO: 93588 - protein, 10 aa, Homo sapiens
  Table A; Target 93588; HLA-B*35:01; TUBA3C; ENSG00000198033; TAA
FPLATYAPVI

SEQ ID NO: 93589 - protein, 10 aa, Homo sapiens
  Table A; Target 93589; HLA-B*35:03; TUBA3C; ENSG00000198033; TAA
FPLATYAPVI

SEQ ID NO: 93590 - protein, 10 aa, Homo sapiens
  Table A; Target 93590; HLA-B*51:01; TUBA3C; ENSG00000198033; TAA
FPLATYAPVI

SEQ ID NO: 93591 - protein, 10 aa, Homo sapiens
  Table A; Target 93591; HLA-B*54:01; TUBA3C; ENSG00000198033; TAA
FPLATYAPVI

SEQ ID NO: 93592 - protein, 10 aa, Homo sapiens
  Table A; Target 93592; HLA-B*55:01; TUBA3C; ENSG00000198033; TAA
FPLATYAPVI

SEQ ID NO: 93593 - protein, 10 aa, Homo sapiens
  Table A; Target 93593; HLA-B*56:01; TUBA3C; ENSG00000198033; TAA
FPLATYAPVI

SEQ ID NO: 93594 - protein, 10 aa, Homo sapiens
  Table A; Target 93594; HLA-C*01:02; TUBA3C; ENSG00000198033; TAA
FPLATYAPVI

SEQ ID NO: 93595 - protein, 10 aa, Homo sapiens
  Table A; Target 93595; HLA-C*03:03; TUBA3C; ENSG00000198033; TAA
FPLATYAPVI

SEQ ID NO: 93596 - protein, 10 aa, Homo sapiens
  Table A; Target 93596; HLA-C*07:01; TUBA3C; ENSG00000198033; TAA
FPLATYAPVI

SEQ ID NO: 93597 - protein, 8 aa, Homo sapiens
  Table A; Target 93597; HLA-B*15:01; TUBA3C; ENSG00000198033; TAA
FQTNLVPY

SEQ ID NO: 93598 - protein, 8 aa, Homo sapiens
  Table A; Target 93598; HLA-B*15:03; TUBA3C; ENSG00000198033; TAA
FQTNLVPY

SEQ ID NO: 93599 - protein, 8 aa, Homo sapiens
  Table A; Target 93599; HLA-B*46:01; TUBA3C; ENSG00000198033; TAA
FQTNLVPY

SEQ ID NO: 93600 - protein, 8 aa, Homo sapiens
  Table A; Target 93600; HLA-C*04:01; TUBA3C; ENSG00000198033; TAA
FQTNLVPY

SEQ ID NO: 93601 - protein, 8 aa, Homo sapiens
  Table A; Target 93601; HLA-C*07:01; TUBA3C; ENSG00000198033; TAA
FQTNLVPY

SEQ ID NO: 93602 - protein, 8 aa, Homo sapiens
  Table A; Target 93602; HLA-C*07:04; TUBA3C; ENSG00000198033; TAA
FQTNLVPY

SEQ ID NO: 93603 - protein, 8 aa, Homo sapiens
  Table A; Target 93603; HLA-C*14:02; TUBA3C; ENSG00000198033; TAA
FQTNLVPY

SEQ ID NO: 93604 - protein, 9 aa, Homo sapiens
  Table A; Target 93604; HLA-B*13:02; TUBA3C; ENSG00000198033; TAA
FQTNLVPYP

SEQ ID NO: 93605 - protein, 9 aa, Homo sapiens
  Table A; Target 93605; HLA-B*27:05; TUBA3C; ENSG00000198033; TAA
FQTNLVPYP

SEQ ID NO: 93606 - protein, 9 aa, Homo sapiens
  Table A; Target 93606; HLA-C*06:02; TUBA3C; ENSG00000198033; TAA
FQTNLVPYP

SEQ ID NO: 93607 - protein, 9 aa, Homo sapiens
  Table A; Target 93607; HLA-C*07:04; TUBA3C; ENSG00000198033; TAA
FQTNLVPYP

SEQ ID NO: 93608 - protein, 10 aa, Homo sapiens
  Table A; Target 93608; HLA-A*31:01; TUBA3C; ENSG00000198033; TAA
FQTNLVPYPR

SEQ ID NO: 93609 - protein, 10 aa, Homo sapiens
  Table A; Target 93609; HLA-B*27:02; TUBA3C; ENSG00000198033; TAA
FQTNLVPYPR

SEQ ID NO: 93610 - protein, 8 aa, Homo sapiens
  Table A; Target 93610; HLA-C*05:01; TUBA3C; ENSG00000198033; TAA
FSEAREDL

SEQ ID NO: 93611 - protein, 8 aa, Homo sapiens
  Table A; Target 93611; HLA-C*16:01; TUBA3C; ENSG00000198033; TAA
FSEAREDL

SEQ ID NO: 93612 - protein, 8 aa, Homo sapiens
  Table A; Target 93612; HLA-C*01:02; TUBA3C; ENSG00000198033; TAA
FSETGAGK

SEQ ID NO: 93613 - protein, 8 aa, Homo sapiens
  Table A; Target 93613; HLA-C*04:01; TUBA3C; ENSG00000198033; TAA
FSETGAGK

SEQ ID NO: 93614 - protein, 8 aa, Homo sapiens
  Table A; Target 93614; HLA-C*05:01; TUBA3C; ENSG00000198033; TAA
FSETGAGK

SEQ ID NO: 93615 - protein, 9 aa, Homo sapiens
  Table A; Target 93615; HLA-A*01:01; TUBA3C; ENSG00000198033; TAA
FSETGAGKH

SEQ ID NO: 93616 - protein, 10 aa, Homo sapiens
  Table A; Target 93616; HLA-A*01:01; TUBA3C; ENSG00000198033; TAA
FSETGAGKHV

SEQ ID NO: 93617 - protein, 10 aa, Homo sapiens
  Table A; Target 93617; HLA-A*68:02; TUBA3C; ENSG00000198033; TAA
FSETGAGKHV

SEQ ID NO: 93618 - protein, 10 aa, Homo sapiens
  Table A; Target 93618; HLA-B*07:02; TUBA3C; ENSG00000198033; TAA
FSETGAGKHV

SEQ ID NO: 93619 - protein, 10 aa, Homo sapiens
  Table A; Target 93619; HLA-B*40:02; TUBA3C; ENSG00000198033; TAA
FSETGAGKHV

SEQ ID NO: 93620 - protein, 10 aa, Homo sapiens
  Table A; Target 93620; HLA-C*01:02; TUBA3C; ENSG00000198033; TAA
FSETGAGKHV

SEQ ID NO: 93621 - protein, 10 aa, Homo sapiens
  Table A; Target 93621; HLA-C*02:02; TUBA3C; ENSG00000198033; TAA
FSETGAGKHV

SEQ ID NO: 93622 - protein, 10 aa, Homo sapiens
  Table A; Target 93622; HLA-C*03:03; TUBA3C; ENSG00000198033; TAA
FSETGAGKHV

SEQ ID NO: 93623 - protein, 10 aa, Homo sapiens
  Table A; Target 93623; HLA-C*03:04; TUBA3C; ENSG00000198033; TAA
FSETGAGKHV

SEQ ID NO: 93624 - protein, 10 aa, Homo sapiens
  Table A; Target 93624; HLA-C*04:01; TUBA3C; ENSG00000198033; TAA
FSETGAGKHV

SEQ ID NO: 93625 - protein, 10 aa, Homo sapiens
  Table A; Target 93625; HLA-C*05:01; TUBA3C; ENSG00000198033; TAA
FSETGAGKHV

SEQ ID NO: 93626 - protein, 10 aa, Homo sapiens
  Table A; Target 93626; HLA-C*06:02; TUBA3C; ENSG00000198033; TAA
FSETGAGKHV

SEQ ID NO: 93627 - protein, 10 aa, Homo sapiens
  Table A; Target 93627; HLA-C*07:01; TUBA3C; ENSG00000198033; TAA
FSETGAGKHV

SEQ ID NO: 93628 - protein, 10 aa, Homo sapiens
  Table A; Target 93628; HLA-C*07:02; TUBA3C; ENSG00000198033; TAA
FSETGAGKHV

SEQ ID NO: 93629 - protein, 10 aa, Homo sapiens
  Table A; Target 93629; HLA-C*12:03; TUBA3C; ENSG00000198033; TAA
FSETGAGKHV

SEQ ID NO: 93630 - protein, 10 aa, Homo sapiens
  Table A; Target 93630; HLA-C*16:02; TUBA3C; ENSG00000198033; TAA
FSETGAGKHV

SEQ ID NO: 93631 - protein, 11 aa, Homo sapiens
  Table A; Target 93631; HLA-A*01:01; TUBA3C; ENSG00000198033; TAA
FSETGAGKHVP

SEQ ID NO: 93632 - protein, 11 aa, Homo sapiens
  Table A; Target 93632; HLA-C*04:01; TUBA3C; ENSG00000198033; TAA
FSETGAGKHVP

SEQ ID NO: 93633 - protein, 11 aa, Homo sapiens
  Table A; Target 93633; HLA-C*06:02; TUBA3C; ENSG00000198033; TAA
FSETGAGKHVP

SEQ ID NO: 93634 - protein, 11 aa, Homo sapiens
  Table A; Target 93634; HLA-C*07:01; TUBA3C; ENSG00000198033; TAA
FSETGAGKHVP

SEQ ID NO: 93635 - protein, 11 aa, Homo sapiens
  Table A; Target 93635; HLA-C*07:04; TUBA3C; ENSG00000198033; TAA
FSETGAGKHVP

SEQ ID NO: 93636 - protein, 11 aa, Homo sapiens
  Table A; Target 93636; HLA-C*16:02; TUBA3C; ENSG00000198033; TAA
FSETGAGKHVP

SEQ ID NO: 93637 - protein, 8 aa, Homo sapiens
  Table A; Target 93637; HLA-A*02:01; TUBA3C; ENSG00000198033; TAA
FVDLEPTV

SEQ ID NO: 93638 - protein, 8 aa, Homo sapiens
  Table A; Target 93638; HLA-A*02:07; TUBA3C; ENSG00000198033; TAA
FVDLEPTV

SEQ ID NO: 93639 - protein, 8 aa, Homo sapiens
  Table A; Target 93639; HLA-B*13:02; TUBA3C; ENSG00000198033; TAA
FVDLEPTV

SEQ ID NO: 93640 - protein, 8 aa, Homo sapiens
  Table A; Target 93640; HLA-B*35:03; TUBA3C; ENSG00000198033; TAA
FVDLEPTV

SEQ ID NO: 93641 - protein, 8 aa, Homo sapiens
  Table A; Target 93641; HLA-B*38:01; TUBA3C; ENSG00000198033; TAA
FVDLEPTV

SEQ ID NO: 93642 - protein, 8 aa, Homo sapiens
  Table A; Target 93642; HLA-B*39:01; TUBA3C; ENSG00000198033; TAA
FVDLEPTV

SEQ ID NO: 93643 - protein, 8 aa, Homo sapiens
  Table A; Target 93643; HLA-B*51:01; TUBA3C; ENSG00000198033; TAA
FVDLEPTV

SEQ ID NO: 93644 - protein, 8 aa, Homo sapiens
  Table A; Target 93644; HLA-B*54:01; TUBA3C; ENSG00000198033; TAA
FVDLEPTV

SEQ ID NO: 93645 - protein, 8 aa, Homo sapiens
  Table A; Target 93645; HLA-B*55:01; TUBA3C; ENSG00000198033; TAA
FVDLEPTV

SEQ ID NO: 93646 - protein, 8 aa, Homo sapiens
  Table A; Target 93646; HLA-B*56:01; TUBA3C; ENSG00000198033; TAA
FVDLEPTV

SEQ ID NO: 93647 - protein, 8 aa, Homo sapiens
  Table A; Target 93647; HLA-C*03:03; TUBA3C; ENSG00000198033; TAA
FVDLEPTV

SEQ ID NO: 93648 - protein, 8 aa, Homo sapiens
  Table A; Target 93648; HLA-C*03:04; TUBA3C; ENSG00000198033; TAA
FVDLEPTV

SEQ ID NO: 93649 - protein, 8 aa, Homo sapiens
  Table A; Target 93649; HLA-C*04:01; TUBA3C; ENSG00000198033; TAA
FVDLEPTV

SEQ ID NO: 93650 - protein, 8 aa, Homo sapiens
  Table A; Target 93650; HLA-C*05:01; TUBA3C; ENSG00000198033; TAA
FVDLEPTV

SEQ ID NO: 93651 - protein, 8 aa, Homo sapiens
  Table A; Target 93651; HLA-C*07:04; TUBA3C; ENSG00000198033; TAA
FVDLEPTV

SEQ ID NO: 93652 - protein, 8 aa, Homo sapiens
  Table A; Target 93652; HLA-C*12:03; TUBA3C; ENSG00000198033; TAA
FVDLEPTV

SEQ ID NO: 93653 - protein, 9 aa, Homo sapiens
  Table A; Target 93653; HLA-A*01:01; TUBA3C; ENSG00000198033; TAA
FVDLEPTVV

SEQ ID NO: 93654 - protein, 9 aa, Homo sapiens
  Table A; Target 93654; HLA-A*02:01; TUBA3C; ENSG00000198033; TAA
FVDLEPTVV

SEQ ID NO: 93655 - protein, 9 aa, Homo sapiens
  Table A; Target 93655; HLA-A*02:03; TUBA3C; ENSG00000198033; TAA
FVDLEPTVV

SEQ ID NO: 93656 - protein, 9 aa, Homo sapiens
  Table A; Target 93656; HLA-A*02:07; TUBA3C; ENSG00000198033; TAA
FVDLEPTVV

SEQ ID NO: 93657 - protein, 9 aa, Homo sapiens
  Table A; Target 93657; HLA-A*68:02; TUBA3C; ENSG00000198033; TAA
FVDLEPTVV

SEQ ID NO: 93658 - protein, 9 aa, Homo sapiens
  Table A; Target 93658; HLA-B*13:02; TUBA3C; ENSG00000198033; TAA
FVDLEPTVV

SEQ ID NO: 93659 - protein, 9 aa, Homo sapiens
  Table A; Target 93659; HLA-B*27:05; TUBA3C; ENSG00000198033; TAA
FVDLEPTVV

SEQ ID NO: 93660 - protein, 9 aa, Homo sapiens
  Table A; Target 93660; HLA-B*35:01; TUBA3C; ENSG00000198033; TAA
FVDLEPTVV

SEQ ID NO: 93661 - protein, 9 aa, Homo sapiens
  Table A; Target 93661; HLA-B*35:03; TUBA3C; ENSG00000198033; TAA
FVDLEPTVV

SEQ ID NO: 93662 - protein, 9 aa, Homo sapiens
  Table A; Target 93662; HLA-B*38:01; TUBA3C; ENSG00000198033; TAA
FVDLEPTVV

SEQ ID NO: 93663 - protein, 9 aa, Homo sapiens
  Table A; Target 93663; HLA-B*39:01; TUBA3C; ENSG00000198033; TAA
FVDLEPTVV

SEQ ID NO: 93664 - protein, 9 aa, Homo sapiens
  Table A; Target 93664; HLA-B*40:01; TUBA3C; ENSG00000198033; TAA
FVDLEPTVV

SEQ ID NO: 93665 - protein, 9 aa, Homo sapiens
  Table A; Target 93665; HLA-B*49:01; TUBA3C; ENSG00000198033; TAA
FVDLEPTVV

SEQ ID NO: 93666 - protein, 9 aa, Homo sapiens
  Table A; Target 93666; HLA-B*51:01; TUBA3C; ENSG00000198033; TAA
FVDLEPTVV

SEQ ID NO: 93667 - protein, 9 aa, Homo sapiens
  Table A; Target 93667; HLA-B*54:01; TUBA3C; ENSG00000198033; TAA
FVDLEPTVV

SEQ ID NO: 93668 - protein, 9 aa, Homo sapiens
  Table A; Target 93668; HLA-B*55:01; TUBA3C; ENSG00000198033; TAA
FVDLEPTVV

SEQ ID NO: 93669 - protein, 9 aa, Homo sapiens
  Table A; Target 93669; HLA-C*02:02; TUBA3C; ENSG00000198033; TAA
FVDLEPTVV

SEQ ID NO: 93670 - protein, 9 aa, Homo sapiens
  Table A; Target 93670; HLA-C*03:03; TUBA3C; ENSG00000198033; TAA
FVDLEPTVV

SEQ ID NO: 93671 - protein, 9 aa, Homo sapiens
  Table A; Target 93671; HLA-C*03:04; TUBA3C; ENSG00000198033; TAA
FVDLEPTVV

SEQ ID NO: 93672 - protein, 9 aa, Homo sapiens
  Table A; Target 93672; HLA-C*04:01; TUBA3C; ENSG00000198033; TAA
FVDLEPTVV

SEQ ID NO: 93673 - protein, 9 aa, Homo sapiens
  Table A; Target 93673; HLA-C*05:01; TUBA3C; ENSG00000198033; TAA
FVDLEPTVV

SEQ ID NO: 93674 - protein, 9 aa, Homo sapiens
  Table A; Target 93674; HLA-C*07:04; TUBA3C; ENSG00000198033; TAA
FVDLEPTVV

SEQ ID NO: 93675 - protein, 9 aa, Homo sapiens
  Table A; Target 93675; HLA-C*12:03; TUBA3C; ENSG00000198033; TAA
FVDLEPTVV

SEQ ID NO: 93676 - protein, 9 aa, Homo sapiens
  Table A; Target 93676; HLA-A*01:01; TUBA3C; ENSG00000198033; TAA
FVDWCPTGF

SEQ ID NO: 93677 - protein, 9 aa, Homo sapiens
  Table A; Target 93677; HLA-A*02:07; TUBA3C; ENSG00000198033; TAA
FVDWCPTGF

SEQ ID NO: 93678 - protein, 9 aa, Homo sapiens
  Table A; Target 93678; HLA-B*55:01; TUBA3C; ENSG00000198033; TAA
FVDWCPTGF

SEQ ID NO: 93679 - protein, 9 aa, Homo sapiens
  Table A; Target 93679; HLA-C*05:01; TUBA3C; ENSG00000198033; TAA
FVDWCPTGF

SEQ ID NO: 93680 - protein, 9 aa, Homo sapiens
  Table A; Target 93680; HLA-C*07:04; TUBA3C; ENSG00000198033; TAA
FVDWCPTGF

SEQ ID NO: 93681 - protein, 10 aa, Homo sapiens
  Table A; Target 93681; HLA-A*68:02; TUBA3C; ENSG00000198033; TAA
FVHWYVGEGM

SEQ ID NO: 93682 - protein, 8 aa, Homo sapiens
  Table A; Target 93682; HLA-A*31:01; TUBA3C; ENSG00000198033; TAA
GAGKHVPR

SEQ ID NO: 93683 - protein, 8 aa, Homo sapiens
  Table A; Target 93683; HLA-A*33:01; TUBA3C; ENSG00000198033; TAA
GAGKHVPR

SEQ ID NO: 93684 - protein, 8 aa, Homo sapiens
  Table A; Target 93684; HLA-A*33:03; TUBA3C; ENSG00000198033; TAA
GAGKHVPR

SEQ ID NO: 93685 - protein, 8 aa, Homo sapiens
  Table A; Target 93685; HLA-C*07:01; TUBA3C; ENSG00000198033; TAA
GAGKHVPR

SEQ ID NO: 93686 - protein, 10 aa, Homo sapiens
  Table A; Target 93686; HLA-A*02:07; TUBA3C; ENSG00000198033; TAA
GALNVDLTEF

SEQ ID NO: 93687 - protein, 10 aa, Homo sapiens
  Table A; Target 93687; HLA-A*23:01; TUBA3C; ENSG00000198033; TAA
GALNVDLTEF

SEQ ID NO: 93688 - protein, 10 aa, Homo sapiens
  Table A; Target 93688; HLA-A*24:02; TUBA3C; ENSG00000198033; TAA
GALNVDLTEF

SEQ ID NO: 93689 - protein, 10 aa, Homo sapiens
  Table A; Target 93689; HLA-A*25:01; TUBA3C; ENSG00000198033; TAA
GALNVDLTEF

SEQ ID NO: 93690 - protein, 10 aa, Homo sapiens
  Table A; Target 93690; HLA-A*26:01; TUBA3C; ENSG00000198033; TAA
GALNVDLTEF

SEQ ID NO: 93691 - protein, 10 aa, Homo sapiens
  Table A; Target 93691; HLA-A*29:02; TUBA3C; ENSG00000198033; TAA
GALNVDLTEF

SEQ ID NO: 93692 - protein, 10 aa, Homo sapiens
  Table A; Target 93692; HLA-A*32:01; TUBA3C; ENSG00000198033; TAA
GALNVDLTEF

SEQ ID NO: 93693 - protein, 10 aa, Homo sapiens
  Table A; Target 93693; HLA-B*15:01; TUBA3C; ENSG00000198033; TAA
GALNVDLTEF

SEQ ID NO: 93694 - protein, 10 aa, Homo sapiens
  Table A; Target 93694; HLA-B*15:03; TUBA3C; ENSG00000198033; TAA
GALNVDLTEF

SEQ ID NO: 93695 - protein, 10 aa, Homo sapiens
  Table A; Target 93695; HLA-B*27:02; TUBA3C; ENSG00000198033; TAA
GALNVDLTEF

SEQ ID NO: 93696 - protein, 10 aa, Homo sapiens
  Table A; Target 93696; HLA-B*27:05; TUBA3C; ENSG00000198033; TAA
GALNVDLTEF

SEQ ID NO: 93697 - protein, 10 aa, Homo sapiens
  Table A; Target 93697; HLA-B*35:01; TUBA3C; ENSG00000198033; TAA
GALNVDLTEF

SEQ ID NO: 93698 - protein, 10 aa, Homo sapiens
  Table A; Target 93698; HLA-B*35:03; TUBA3C; ENSG00000198033; TAA
GALNVDLTEF

SEQ ID NO: 93699 - protein, 10 aa, Homo sapiens
  Table A; Target 93699; HLA-B*38:01; TUBA3C; ENSG00000198033; TAA
GALNVDLTEF

SEQ ID NO: 93700 - protein, 10 aa, Homo sapiens
  Table A; Target 93700; HLA-B*39:01; TUBA3C; ENSG00000198033; TAA
GALNVDLTEF

SEQ ID NO: 93701 - protein, 10 aa, Homo sapiens
  Table A; Target 93701; HLA-B*40:02; TUBA3C; ENSG00000198033; TAA
GALNVDLTEF

SEQ ID NO: 93702 - protein, 10 aa, Homo sapiens
  Table A; Target 93702; HLA-B*46:01; TUBA3C; ENSG00000198033; TAA
GALNVDLTEF

SEQ ID NO: 93703 - protein, 10 aa, Homo sapiens
  Table A; Target 93703; HLA-B*55:01; TUBA3C; ENSG00000198033; TAA
GALNVDLTEF

SEQ ID NO: 93704 - protein, 10 aa, Homo sapiens
  Table A; Target 93704; HLA-B*57:01; TUBA3C; ENSG00000198033; TAA
GALNVDLTEF

SEQ ID NO: 93705 - protein, 10 aa, Homo sapiens
  Table A; Target 93705; HLA-B*58:01; TUBA3C; ENSG00000198033; TAA
GALNVDLTEF

SEQ ID NO: 93706 - protein, 10 aa, Homo sapiens
  Table A; Target 93706; HLA-C*02:02; TUBA3C; ENSG00000198033; TAA
GALNVDLTEF

SEQ ID NO: 93707 - protein, 10 aa, Homo sapiens
  Table A; Target 93707; HLA-C*03:03; TUBA3C; ENSG00000198033; TAA
GALNVDLTEF

SEQ ID NO: 93708 - protein, 10 aa, Homo sapiens
  Table A; Target 93708; HLA-C*04:01; TUBA3C; ENSG00000198033; TAA
GALNVDLTEF

SEQ ID NO: 93709 - protein, 10 aa, Homo sapiens
  Table A; Target 93709; HLA-C*05:01; TUBA3C; ENSG00000198033; TAA
GALNVDLTEF

SEQ ID NO: 93710 - protein, 10 aa, Homo sapiens
  Table A; Target 93710; HLA-C*07:01; TUBA3C; ENSG00000198033; TAA
GALNVDLTEF

SEQ ID NO: 93711 - protein, 10 aa, Homo sapiens
  Table A; Target 93711; HLA-C*07:04; TUBA3C; ENSG00000198033; TAA
GALNVDLTEF

SEQ ID NO: 93712 - protein, 10 aa, Homo sapiens
  Table A; Target 93712; HLA-C*07:06; TUBA3C; ENSG00000198033; TAA
GALNVDLTEF

SEQ ID NO: 93713 - protein, 10 aa, Homo sapiens
  Table A; Target 93713; HLA-C*12:03; TUBA3C; ENSG00000198033; TAA
GALNVDLTEF

SEQ ID NO: 93714 - protein, 10 aa, Homo sapiens
  Table A; Target 93714; HLA-C*16:02; TUBA3C; ENSG00000198033; TAA
GALNVDLTEF

SEQ ID NO: 93715 - protein, 10 aa, Homo sapiens
  Table A; Target 93715; HLA-C*16:04; TUBA3C; ENSG00000198033; TAA
GALNVDLTEF

SEQ ID NO: 93716 - protein, 8 aa, Homo sapiens
  Table A; Target 93716; HLA-B*18:01; TUBA3C; ENSG00000198033; TAA
GDDSFNTF

SEQ ID NO: 93717 - protein, 8 aa, Homo sapiens
  Table A; Target 93717; HLA-B*37:01; TUBA3C; ENSG00000198033; TAA
GDDSFNTF

SEQ ID NO: 93718 - protein, 8 aa, Homo sapiens
  Table A; Target 93718; HLA-B*38:01; TUBA3C; ENSG00000198033; TAA
GDDSFNTF

SEQ ID NO: 93719 - protein, 8 aa, Homo sapiens
  Table A; Target 93719; HLA-B*40:02; TUBA3C; ENSG00000198033; TAA
GDDSFNTF

SEQ ID NO: 93720 - protein, 8 aa, Homo sapiens
  Table A; Target 93720; HLA-C*04:01; TUBA3C; ENSG00000198033; TAA
GDDSFNTF

SEQ ID NO: 93721 - protein, 8 aa, Homo sapiens
  Table A; Target 93721; HLA-C*05:01; TUBA3C; ENSG00000198033; TAA
GDDSFNTF

SEQ ID NO: 93722 - protein, 8 aa, Homo sapiens
  Table A; Target 93722; HLA-C*07:01; TUBA3C; ENSG00000198033; TAA
GDDSFNTF

SEQ ID NO: 93723 - protein, 9 aa, Homo sapiens
  Table A; Target 93723; HLA-A*02:07; TUBA3C; ENSG00000198033; TAA
GDDSFNTFF

SEQ ID NO: 93724 - protein, 9 aa, Homo sapiens
  Table A; Target 93724; HLA-B*37:01; TUBA3C; ENSG00000198033; TAA
GDDSFNTFF

SEQ ID NO: 93725 - protein, 9 aa, Homo sapiens
  Table A; Target 93725; HLA-B*38:01; TUBA3C; ENSG00000198033; TAA
GDDSFNTFF

SEQ ID NO: 93726 - protein, 9 aa, Homo sapiens
  Table A; Target 93726; HLA-B*44:02; TUBA3C; ENSG00000198033; TAA
GDDSFNTFF

SEQ ID NO: 93727 - protein, 9 aa, Homo sapiens
  Table A; Target 93727; HLA-B*49:01; TUBA3C; ENSG00000198033; TAA
GDDSFNTFF

SEQ ID NO: 93728 - protein, 9 aa, Homo sapiens
  Table A; Target 93728; HLA-C*04:01; TUBA3C; ENSG00000198033; TAA
GDDSFNTFF

SEQ ID NO: 93729 - protein, 9 aa, Homo sapiens
  Table A; Target 93729; HLA-C*07:01; TUBA3C; ENSG00000198033; TAA
GDDSFNTFF

SEQ ID NO: 93730 - protein, 9 aa, Homo sapiens
  Table A; Target 93730; HLA-B*37:01; TUBA3C; ENSG00000198033; TAA
GDLAKVQRA

SEQ ID NO: 93731 - protein, 10 aa, Homo sapiens
  Table A; Target 93731; HLA-C*06:02; TUBA3C; ENSG00000198033; TAA
GDLAKVQRAV

SEQ ID NO: 93732 - protein, 8 aa, Homo sapiens
  Table A; Target 93732; HLA-B*37:01; TUBA3C; ENSG00000198033; TAA
GDVVPKDV

SEQ ID NO: 93733 - protein, 8 aa, Homo sapiens
  Table A; Target 93733; HLA-B*40:02; TUBA3C; ENSG00000198033; TAA
GDVVPKDV

SEQ ID NO: 93734 - protein, 8 aa, Homo sapiens
  Table A; Target 93734; HLA-C*04:01; TUBA3C; ENSG00000198033; TAA
GDVVPKDV

SEQ ID NO: 93735 - protein, 8 aa, Homo sapiens
  Table A; Target 93735; HLA-C*06:02; TUBA3C; ENSG00000198033; TAA
GDVVPKDV

SEQ ID NO: 93736 - protein, 8 aa, Homo sapiens
  Table A; Target 93736; HLA-C*07:01; TUBA3C; ENSG00000198033; TAA
GDVVPKDV

SEQ ID NO: 93737 - protein, 8 aa, Homo sapiens
  Table A; Target 93737; HLA-C*12:03; TUBA3C; ENSG00000198033; TAA
GDVVPKDV

SEQ ID NO: 93738 - protein, 8 aa, Homo sapiens
  Table A; Target 93738; HLA-C*16:02; TUBA3C; ENSG00000198033; TAA
GDVVPKDV

SEQ ID NO: 93739 - protein, 8 aa, Homo sapiens
  Table A; Target 93739; HLA-C*16:04; TUBA3C; ENSG00000198033; TAA
GDVVPKDV

SEQ ID NO: 93740 - protein, 9 aa, Homo sapiens
  Table A; Target 93740; HLA-C*07:01; TUBA3C; ENSG00000198033; TAA
GDVVPKDVN

SEQ ID NO: 93741 - protein, 10 aa, Homo sapiens
  Table A; Target 93741; HLA-B*27:02; TUBA3C; ENSG00000198033; TAA
GDVVPKDVNA

SEQ ID NO: 93742 - protein, 10 aa, Homo sapiens
  Table A; Target 93742; HLA-B*27:05; TUBA3C; ENSG00000198033; TAA
GDVVPKDVNA

SEQ ID NO: 93743 - protein, 10 aa, Homo sapiens
  Table A; Target 93743; HLA-B*40:02; TUBA3C; ENSG00000198033; TAA
GDVVPKDVNA

SEQ ID NO: 93744 - protein, 10 aa, Homo sapiens
  Table A; Target 93744; HLA-C*07:01; TUBA3C; ENSG00000198033; TAA
GDVVPKDVNA

SEQ ID NO: 93745 - protein, 10 aa, Homo sapiens
  Table A; Target 93745; HLA-A*30:01; TUBA3C; ENSG00000198033; TAA
GEFSEAREDL

SEQ ID NO: 93746 - protein, 10 aa, Homo sapiens
  Table A; Target 93746; HLA-B*27:02; TUBA3C; ENSG00000198033; TAA
GEFSEAREDL

SEQ ID NO: 93747 - protein, 10 aa, Homo sapiens
  Table A; Target 93747; HLA-B*27:05; TUBA3C; ENSG00000198033; TAA
GEFSEAREDL

SEQ ID NO: 93748 - protein, 10 aa, Homo sapiens
  Table A; Target 93748; HLA-B*40:01; TUBA3C; ENSG00000198033; TAA
GEFSEAREDL

SEQ ID NO: 93749 - protein, 10 aa, Homo sapiens
  Table A; Target 93749; HLA-B*40:02; TUBA3C; ENSG00000198033; TAA
GEFSEAREDL

SEQ ID NO: 93750 - protein, 10 aa, Homo sapiens
  Table A; Target 93750; HLA-B*44:02; TUBA3C; ENSG00000198033; TAA
GEFSEAREDL

SEQ ID NO: 93751 - protein, 10 aa, Homo sapiens
  Table A; Target 93751; HLA-B*44:03; TUBA3C; ENSG00000198033; TAA
GEFSEAREDL

SEQ ID NO: 93752 - protein, 10 aa, Homo sapiens
  Table A; Target 93752; HLA-B*49:01; TUBA3C; ENSG00000198033; TAA
GEFSEAREDL

SEQ ID NO: 93753 - protein, 10 aa, Homo sapiens
  Table A; Target 93753; HLA-C*16:04; TUBA3C; ENSG00000198033; TAA
GEFSEAREDL

SEQ ID NO: 93754 - protein, 11 aa, Homo sapiens
  Table A; Target 93754; HLA-A*30:01; TUBA3C; ENSG00000198033; TAA
GEFSEAREDLA

SEQ ID NO: 93755 - protein, 11 aa, Homo sapiens
  Table A; Target 93755; HLA-B*40:01; TUBA3C; ENSG00000198033; TAA
GEFSEAREDLA

SEQ ID NO: 93756 - protein, 11 aa, Homo sapiens
  Table A; Target 93756; HLA-B*40:02; TUBA3C; ENSG00000198033; TAA
GEFSEAREDLA

SEQ ID NO: 93757 - protein, 11 aa, Homo sapiens
  Table A; Target 93757; HLA-B*49:01; TUBA3C; ENSG00000198033; TAA
GEFSEAREDLA

SEQ ID NO: 93758 - protein, 9 aa, Homo sapiens
  Table A; Target 93758; HLA-B*27:02; TUBA3C; ENSG00000198033; TAA
GEGMEEGEF

SEQ ID NO: 93759 - protein, 9 aa, Homo sapiens
  Table A; Target 93759; HLA-B*39:01; TUBA3C; ENSG00000198033; TAA
GEGMEEGEF

SEQ ID NO: 93760 - protein, 9 aa, Homo sapiens
  Table A; Target 93760; HLA-B*40:01; TUBA3C; ENSG00000198033; TAA
GEGMEEGEF

SEQ ID NO: 93761 - protein, 9 aa, Homo sapiens
  Table A; Target 93761; HLA-B*40:02; TUBA3C; ENSG00000198033; TAA
GEGMEEGEF

SEQ ID NO: 93762 - protein, 9 aa, Homo sapiens
  Table A; Target 93762; HLA-B*44:02; TUBA3C; ENSG00000198033; TAA
GEGMEEGEF

SEQ ID NO: 93763 - protein, 9 aa, Homo sapiens
  Table A; Target 93763; HLA-B*44:03; TUBA3C; ENSG00000198033; TAA
GEGMEEGEF

SEQ ID NO: 93764 - protein, 9 aa, Homo sapiens
  Table A; Target 93764; HLA-A*31:01; TUBA3C; ENSG00000198033; TAA
GFASLLMER

SEQ ID NO: 93765 - protein, 9 aa, Homo sapiens
  Table A; Target 93765; HLA-A*33:03; TUBA3C; ENSG00000198033; TAA
GFASLLMER

SEQ ID NO: 93766 - protein, 8 aa, Homo sapiens
  Table A; Target 93766; HLA-A*30:02; TUBA3C; ENSG00000198033; TAA
GFKVGINY

SEQ ID NO: 93767 - protein, 8 aa, Homo sapiens
  Table A; Target 93767; HLA-B*15:01; TUBA3C; ENSG00000198033; TAA
GFKVGINY

SEQ ID NO: 93768 - protein, 8 aa, Homo sapiens
  Table A; Target 93768; HLA-B*15:03; TUBA3C; ENSG00000198033; TAA
GFKVGINY

SEQ ID NO: 93769 - protein, 8 aa, Homo sapiens
  Table A; Target 93769; HLA-C*14:02; TUBA3C; ENSG00000198033; TAA
GFKVGINY

SEQ ID NO: 93770 - protein, 8 aa, Homo sapiens
  Table A; Target 93770; HLA-A*23:01; TUBA3C; ENSG00000198033; TAA
GFLIFHSF

SEQ ID NO: 93771 - protein, 8 aa, Homo sapiens
  Table A; Target 93771; HLA-A*24:02; TUBA3C; ENSG00000198033; TAA
GFLIFHSF

SEQ ID NO: 93772 - protein, 8 aa, Homo sapiens
  Table A; Target 93772; HLA-B*57:01; TUBA3C; ENSG00000198033; TAA
GFLIFHSF

SEQ ID NO: 93773 - protein, 9 aa, Homo sapiens
  Table A; Target 93773; HLA-A*01:01; TUBA3C; ENSG00000198033; TAA
GGDDSFNTF

SEQ ID NO: 93774 - protein, 9 aa, Homo sapiens
  Table A; Target 93774; HLA-A*02:07; TUBA3C; ENSG00000198033; TAA
GGDDSFNTF

SEQ ID NO: 93775 - protein, 9 aa, Homo sapiens
  Table A; Target 93775; HLA-A*23:01; TUBA3C; ENSG00000198033; TAA
GGDDSFNTF

SEQ ID NO: 93776 - protein, 9 aa, Homo sapiens
  Table A; Target 93776; HLA-A*24:02; TUBA3C; ENSG00000198033; TAA
GGDDSFNTF

SEQ ID NO: 93777 - protein, 9 aa, Homo sapiens
  Table A; Target 93777; HLA-A*25:01; TUBA3C; ENSG00000198033; TAA
GGDDSFNTF

SEQ ID NO: 93778 - protein, 9 aa, Homo sapiens
  Table A; Target 93778; HLA-A*32:01; TUBA3C; ENSG00000198033; TAA
GGDDSFNTF

SEQ ID NO: 93779 - protein, 9 aa, Homo sapiens
  Table A; Target 93779; HLA-B*15:01; TUBA3C; ENSG00000198033; TAA
GGDDSFNTF

SEQ ID NO: 93780 - protein, 9 aa, Homo sapiens
  Table A; Target 93780; HLA-B*15:03; TUBA3C; ENSG00000198033; TAA
GGDDSFNTF

SEQ ID NO: 93781 - protein, 9 aa, Homo sapiens
  Table A; Target 93781; HLA-B*18:01; TUBA3C; ENSG00000198033; TAA
GGDDSFNTF

SEQ ID NO: 93782 - protein, 9 aa, Homo sapiens
  Table A; Target 93782; HLA-B*27:02; TUBA3C; ENSG00000198033; TAA
GGDDSFNTF

SEQ ID NO: 93783 - protein, 9 aa, Homo sapiens
  Table A; Target 93783; HLA-B*27:05; TUBA3C; ENSG00000198033; TAA
GGDDSFNTF

SEQ ID NO: 93784 - protein, 9 aa, Homo sapiens
  Table A; Target 93784; HLA-B*35:01; TUBA3C; ENSG00000198033; TAA
GGDDSFNTF

SEQ ID NO: 93785 - protein, 9 aa, Homo sapiens
  Table A; Target 93785; HLA-B*35:03; TUBA3C; ENSG00000198033; TAA
GGDDSFNTF

SEQ ID NO: 93786 - protein, 9 aa, Homo sapiens
  Table A; Target 93786; HLA-B*38:01; TUBA3C; ENSG00000198033; TAA
GGDDSFNTF

SEQ ID NO: 93787 - protein, 9 aa, Homo sapiens
  Table A; Target 93787; HLA-B*39:01; TUBA3C; ENSG00000198033; TAA
GGDDSFNTF

SEQ ID NO: 93788 - protein, 9 aa, Homo sapiens
  Table A; Target 93788; HLA-B*40:01; TUBA3C; ENSG00000198033; TAA
GGDDSFNTF

SEQ ID NO: 93789 - protein, 9 aa, Homo sapiens
  Table A; Target 93789; HLA-B*46:01; TUBA3C; ENSG00000198033; TAA
GGDDSFNTF

SEQ ID NO: 93790 - protein, 9 aa, Homo sapiens
  Table A; Target 93790; HLA-B*55:01; TUBA3C; ENSG00000198033; TAA
GGDDSFNTF

SEQ ID NO: 93791 - protein, 9 aa, Homo sapiens
  Table A; Target 93791; HLA-B*58:01; TUBA3C; ENSG00000198033; TAA
GGDDSFNTF

SEQ ID NO: 93792 - protein, 9 aa, Homo sapiens
  Table A; Target 93792; HLA-C*01:02; TUBA3C; ENSG00000198033; TAA
GGDDSFNTF

SEQ ID NO: 93793 - protein, 9 aa, Homo sapiens
  Table A; Target 93793; HLA-C*02:02; TUBA3C; ENSG00000198033; TAA
GGDDSFNTF

SEQ ID NO: 93794 - protein, 9 aa, Homo sapiens
  Table A; Target 93794; HLA-C*03:03; TUBA3C; ENSG00000198033; TAA
GGDDSFNTF

SEQ ID NO: 93795 - protein, 9 aa, Homo sapiens
  Table A; Target 93795; HLA-C*03:04; TUBA3C; ENSG00000198033; TAA
GGDDSFNTF

SEQ ID NO: 93796 - protein, 9 aa, Homo sapiens
  Table A; Target 93796; HLA-C*04:01; TUBA3C; ENSG00000198033; TAA
GGDDSFNTF

SEQ ID NO: 93797 - protein, 9 aa, Homo sapiens
  Table A; Target 93797; HLA-C*05:01; TUBA3C; ENSG00000198033; TAA
GGDDSFNTF

SEQ ID NO: 93798 - protein, 9 aa, Homo sapiens
  Table A; Target 93798; HLA-C*07:04; TUBA3C; ENSG00000198033; TAA
GGDDSFNTF

SEQ ID NO: 93799 - protein, 9 aa, Homo sapiens
  Table A; Target 93799; HLA-C*12:03; TUBA3C; ENSG00000198033; TAA
GGDDSFNTF

SEQ ID NO: 93800 - protein, 9 aa, Homo sapiens
  Table A; Target 93800; HLA-C*16:04; TUBA3C; ENSG00000198033; TAA
GGDDSFNTF

SEQ ID NO: 93801 - protein, 10 aa, Homo sapiens
  Table A; Target 93801; HLA-A*02:07; TUBA3C; ENSG00000198033; TAA
GGDDSFNTFF

SEQ ID NO: 93802 - protein, 10 aa, Homo sapiens
  Table A; Target 93802; HLA-B*27:02; TUBA3C; ENSG00000198033; TAA
GGDDSFNTFF

SEQ ID NO: 93803 - protein, 10 aa, Homo sapiens
  Table A; Target 93803; HLA-B*27:05; TUBA3C; ENSG00000198033; TAA
GGDDSFNTFF

SEQ ID NO: 93804 - protein, 10 aa, Homo sapiens
  Table A; Target 93804; HLA-B*38:01; TUBA3C; ENSG00000198033; TAA
GGDDSFNTFF

SEQ ID NO: 93805 - protein, 10 aa, Homo sapiens
  Table A; Target 93805; HLA-C*04:01; TUBA3C; ENSG00000198033; TAA
GGDDSFNTFF

SEQ ID NO: 93806 - protein, 10 aa, Homo sapiens
  Table A; Target 93806; HLA-C*05:01; TUBA3C; ENSG00000198033; TAA
GGDDSFNTFF

SEQ ID NO: 93807 - protein, 9 aa, Homo sapiens
  Table A; Target 93807; HLA-A*31:01; TUBA3C; ENSG00000198033; TAA
GGDLAKVQR

SEQ ID NO: 93808 - protein, 10 aa, Homo sapiens
  Table A; Target 93808; HLA-A*23:01; TUBA3C; ENSG00000198033; TAA
GGGDDSFNTF

SEQ ID NO: 93809 - protein, 10 aa, Homo sapiens
  Table A; Target 93809; HLA-A*25:01; TUBA3C; ENSG00000198033; TAA
GGGDDSFNTF

SEQ ID NO: 93810 - protein, 10 aa, Homo sapiens
  Table A; Target 93810; HLA-B*15:01; TUBA3C; ENSG00000198033; TAA
GGGDDSFNTF

SEQ ID NO: 93811 - protein, 10 aa, Homo sapiens
  Table A; Target 93811; HLA-B*27:05; TUBA3C; ENSG00000198033; TAA
GGGDDSFNTF

SEQ ID NO: 93812 - protein, 10 aa, Homo sapiens
  Table A; Target 93812; HLA-B*38:01; TUBA3C; ENSG00000198033; TAA
GGGDDSFNTF

SEQ ID NO: 93813 - protein, 10 aa, Homo sapiens
  Table A; Target 93813; HLA-B*39:01; TUBA3C; ENSG00000198033; TAA
GGGDDSFNTF

SEQ ID NO: 93814 - protein, 10 aa, Homo sapiens
  Table A; Target 93814; HLA-B*58:01; TUBA3C; ENSG00000198033; TAA
GGGDDSFNTF

SEQ ID NO: 93815 - protein, 10 aa, Homo sapiens
  Table A; Target 93815; HLA-C*02:02; TUBA3C; ENSG00000198033; TAA
GGGDDSFNTF

SEQ ID NO: 93816 - protein, 10 aa, Homo sapiens
  Table A; Target 93816; HLA-C*14:02; TUBA3C; ENSG00000198033; TAA
GGGDDSFNTF

SEQ ID NO: 93817 - protein, 10 aa, Homo sapiens
  Table A; Target 93817; HLA-C*16:04; TUBA3C; ENSG00000198033; TAA
GGGDDSFNTF

SEQ ID NO: 93818 - protein, 11 aa, Homo sapiens
  Table A; Target 93818; HLA-B*27:05; TUBA3C; ENSG00000198033; TAA
GGGDDSFNTFF

SEQ ID NO: 93819 - protein, 11 aa, Homo sapiens
  Table A; Target 93819; HLA-C*04:01; TUBA3C; ENSG00000198033; TAA
GGGDDSFNTFF

SEQ ID NO: 93820 - protein, 11 aa, Homo sapiens
  Table A; Target 93820; HLA-C*07:01; TUBA3C; ENSG00000198033; TAA
GGGDDSFNTFF

SEQ ID NO: 93821 - protein, 8 aa, Homo sapiens
  Table A; Target 93821; HLA-B*15:01; TUBA3C; ENSG00000198033; TAA
GGGTGSGF

SEQ ID NO: 93822 - protein, 8 aa, Homo sapiens
  Table A; Target 93822; HLA-B*15:03; TUBA3C; ENSG00000198033; TAA
GGGTGSGF

SEQ ID NO: 93823 - protein, 8 aa, Homo sapiens
  Table A; Target 93823; HLA-B*39:01; TUBA3C; ENSG00000198033; TAA
GGGTGSGF

SEQ ID NO: 93824 - protein, 8 aa, Homo sapiens
  Table A; Target 93824; HLA-C*01:02; TUBA3C; ENSG00000198033; TAA
GGGTGSGF

SEQ ID NO: 93825 - protein, 8 aa, Homo sapiens
  Table A; Target 93825; HLA-C*04:01; TUBA3C; ENSG00000198033; TAA
GGGTGSGF

SEQ ID NO: 93826 - protein, 8 aa, Homo sapiens
  Table A; Target 93826; HLA-C*05:01; TUBA3C; ENSG00000198033; TAA
GGGTGSGF

SEQ ID NO: 93827 - protein, 8 aa, Homo sapiens
  Table A; Target 93827; HLA-C*14:02; TUBA3C; ENSG00000198033; TAA
GGGTGSGF

SEQ ID NO: 93828 - protein, 10 aa, Homo sapiens
  Table A; Target 93828; HLA-B*27:05; TUBA3C; ENSG00000198033; TAA
GGGTGSGFAS

SEQ ID NO: 93829 - protein, 11 aa, Homo sapiens
  Table A; Target 93829; HLA-A*30:01; TUBA3C; ENSG00000198033; TAA
GGGTGSGFASL

SEQ ID NO: 93830 - protein, 11 aa, Homo sapiens
  Table A; Target 93830; HLA-B*27:05; TUBA3C; ENSG00000198033; TAA
GGGTGSGFASL

SEQ ID NO: 93831 - protein, 11 aa, Homo sapiens
  Table A; Target 93831; HLA-B*39:01; TUBA3C; ENSG00000198033; TAA
GGGTGSGFASL

SEQ ID NO: 93832 - protein, 11 aa, Homo sapiens
  Table A; Target 93832; HLA-B*40:01; TUBA3C; ENSG00000198033; TAA
GGGTGSGFASL

SEQ ID NO: 93833 - protein, 11 aa, Homo sapiens
  Table A; Target 93833; HLA-B*40:02; TUBA3C; ENSG00000198033; TAA
GGGTGSGFASL

SEQ ID NO: 93834 - protein, 11 aa, Homo sapiens
  Table A; Target 93834; HLA-C*01:02; TUBA3C; ENSG00000198033; TAA
GGGTGSGFASL

SEQ ID NO: 93835 - protein, 11 aa, Homo sapiens
  Table A; Target 93835; HLA-C*07:01; TUBA3C; ENSG00000198033; TAA
GGGTGSGFASL

SEQ ID NO: 93836 - protein, 11 aa, Homo sapiens
  Table A; Target 93836; HLA-C*07:02; TUBA3C; ENSG00000198033; TAA
GGGTGSGFASL

SEQ ID NO: 93837 - protein, 8 aa, Homo sapiens
  Table A; Target 93837; HLA-C*06:02; TUBA3C; ENSG00000198033; TAA
GGTGSGFA

SEQ ID NO: 93838 - protein, 10 aa, Homo sapiens
  Table A; Target 93838; HLA-A*30:01; TUBA3C; ENSG00000198033; TAA
GGTGSGFASL

SEQ ID NO: 93839 - protein, 10 aa, Homo sapiens
  Table A; Target 93839; HLA-B*39:01; TUBA3C; ENSG00000198033; TAA
GGTGSGFASL

SEQ ID NO: 93840 - protein, 10 aa, Homo sapiens
  Table A; Target 93840; HLA-B*40:01; TUBA3C; ENSG00000198033; TAA
GGTGSGFASL

SEQ ID NO: 93841 - protein, 10 aa, Homo sapiens
  Table A; Target 93841; HLA-B*40:02; TUBA3C; ENSG00000198033; TAA
GGTGSGFASL

SEQ ID NO: 93842 - protein, 10 aa, Homo sapiens
  Table A; Target 93842; HLA-C*03:03; TUBA3C; ENSG00000198033; TAA
GGTGSGFASL

SEQ ID NO: 93843 - protein, 10 aa, Homo sapiens
  Table A; Target 93843; HLA-C*03:04; TUBA3C; ENSG00000198033; TAA
GGTGSGFASL

SEQ ID NO: 93844 - protein, 10 aa, Homo sapiens
  Table A; Target 93844; HLA-C*07:02; TUBA3C; ENSG00000198033; TAA
GGTGSGFASL

SEQ ID NO: 93845 - protein, 11 aa, Homo sapiens
  Table A; Target 93845; HLA-B*07:02; TUBA3C; ENSG00000198033; TAA
GGTGSGFASLL

SEQ ID NO: 93846 - protein, 11 aa, Homo sapiens
  Table A; Target 93846; HLA-B*40:01; TUBA3C; ENSG00000198033; TAA
GGTGSGFASLL

SEQ ID NO: 93847 - protein, 11 aa, Homo sapiens
  Table A; Target 93847; HLA-C*06:02; TUBA3C; ENSG00000198033; TAA
GGTGSGFASLL

SEQ ID NO: 93848 - protein, 11 aa, Homo sapiens
  Table A; Target 93848; HLA-C*07:01; TUBA3C; ENSG00000198033; TAA
GGTGSGFASLL

SEQ ID NO: 93849 - protein, 11 aa, Homo sapiens
  Table A; Target 93849; HLA-C*07:02; TUBA3C; ENSG00000198033; TAA
GGTGSGFASLL

SEQ ID NO: 93850 - protein, 11 aa, Homo sapiens
  Table A; Target 93850; HLA-C*16:02; TUBA3C; ENSG00000198033; TAA
GGTGSGFASLL

SEQ ID NO: 93851 - protein, 9 aa, Homo sapiens
  Table A; Target 93851; HLA-B*13:02; TUBA3C; ENSG00000198033; TAA
GHYTIGKEI

SEQ ID NO: 93852 - protein, 9 aa, Homo sapiens
  Table A; Target 93852; HLA-B*27:05; TUBA3C; ENSG00000198033; TAA
GHYTIGKEI

SEQ ID NO: 93853 - protein, 9 aa, Homo sapiens
  Table A; Target 93853; HLA-B*38:01; TUBA3C; ENSG00000198033; TAA
GHYTIGKEI

SEQ ID NO: 93854 - protein, 9 aa, Homo sapiens
  Table A; Target 93854; HLA-B*40:02; TUBA3C; ENSG00000198033; TAA
GHYTIGKEI

SEQ ID NO: 93855 - protein, 9 aa, Homo sapiens
  Table A; Target 93855; HLA-C*06:02; TUBA3C; ENSG00000198033; TAA
GHYTIGKEI

SEQ ID NO: 93856 - protein, 9 aa, Homo sapiens
  Table A; Target 93856; HLA-C*16:04; TUBA3C; ENSG00000198033; TAA
GHYTIGKEI

SEQ ID NO: 93857 - protein, 10 aa, Homo sapiens
  Table A; Target 93857; HLA-B*38:01; TUBA3C; ENSG00000198033; TAA
GHYTIGKEIV

SEQ ID NO: 93858 - protein, 9 aa, Homo sapiens
  Table A; Target 93858; HLA-A*02:01; TUBA3C; ENSG00000198033; TAA
GINYQPPTV

SEQ ID NO: 93859 - protein, 9 aa, Homo sapiens
  Table A; Target 93859; HLA-A*02:03; TUBA3C; ENSG00000198033; TAA
GINYQPPTV

SEQ ID NO: 93860 - protein, 9 aa, Homo sapiens
  Table A; Target 93860; HLA-A*02:04; TUBA3C; ENSG00000198033; TAA
GINYQPPTV

SEQ ID NO: 93861 - protein, 9 aa, Homo sapiens
  Table A; Target 93861; HLA-A*02:07; TUBA3C; ENSG00000198033; TAA
GINYQPPTV

SEQ ID NO: 93862 - protein, 9 aa, Homo sapiens
  Table A; Target 93862; HLA-A*30:01; TUBA3C; ENSG00000198033; TAA
GINYQPPTV

SEQ ID NO: 93863 - protein, 9 aa, Homo sapiens
  Table A; Target 93863; HLA-A*32:01; TUBA3C; ENSG00000198033; TAA
GINYQPPTV

SEQ ID NO: 93864 - protein, 9 aa, Homo sapiens
  Table A; Target 93864; HLA-B*13:02; TUBA3C; ENSG00000198033; TAA
GINYQPPTV

SEQ ID NO: 93865 - protein, 9 aa, Homo sapiens
  Table A; Target 93865; HLA-B*40:02; TUBA3C; ENSG00000198033; TAA
GINYQPPTV

SEQ ID NO: 93866 - protein, 9 aa, Homo sapiens
  Table A; Target 93866; HLA-B*46:01; TUBA3C; ENSG00000198033; TAA
GINYQPPTV

SEQ ID NO: 93867 - protein, 9 aa, Homo sapiens
  Table A; Target 93867; HLA-B*51:01; TUBA3C; ENSG00000198033; TAA
GINYQPPTV

SEQ ID NO: 93868 - protein, 9 aa, Homo sapiens
  Table A; Target 93868; HLA-B*55:01; TUBA3C; ENSG00000198033; TAA
GINYQPPTV

SEQ ID NO: 93869 - protein, 9 aa, Homo sapiens
  Table A; Target 93869; HLA-B*56:01; TUBA3C; ENSG00000198033; TAA
GINYQPPTV

SEQ ID NO: 93870 - protein, 9 aa, Homo sapiens
  Table A; Target 93870; HLA-B*58:01; TUBA3C; ENSG00000198033; TAA
GINYQPPTV

SEQ ID NO: 93871 - protein, 9 aa, Homo sapiens
  Table A; Target 93871; HLA-C*06:02; TUBA3C; ENSG00000198033; TAA
GINYQPPTV

SEQ ID NO: 93872 - protein, 9 aa, Homo sapiens
  Table A; Target 93872; HLA-C*07:04; TUBA3C; ENSG00000198033; TAA
GINYQPPTV

SEQ ID NO: 93873 - protein, 10 aa, Homo sapiens
  Table A; Target 93873; HLA-A*02:03; TUBA3C; ENSG00000198033; TAA
GINYQPPTVV

SEQ ID NO: 93874 - protein, 10 aa, Homo sapiens
  Table A; Target 93874; HLA-B*13:02; TUBA3C; ENSG00000198033; TAA
GINYQPPTVV

SEQ ID NO: 93875 - protein, 10 aa, Homo sapiens
  Table A; Target 93875; HLA-B*55:01; TUBA3C; ENSG00000198033; TAA
GINYQPPTVV

SEQ ID NO: 93876 - protein, 9 aa, Homo sapiens
  Table A; Target 93876; HLA-B*15:01; TUBA3C; ENSG00000198033; TAA
GKEDAANNY

SEQ ID NO: 93877 - protein, 9 aa, Homo sapiens
  Table A; Target 93877; HLA-B*15:03; TUBA3C; ENSG00000198033; TAA
GKEDAANNY

SEQ ID NO: 93878 - protein, 9 aa, Homo sapiens
  Table A; Target 93878; HLA-B*27:05; TUBA3C; ENSG00000198033; TAA
GKEDAANNY

SEQ ID NO: 93879 - protein, 9 aa, Homo sapiens
  Table A; Target 93879; HLA-B*39:01; TUBA3C; ENSG00000198033; TAA
GKEDAANNY

SEQ ID NO: 93880 - protein, 9 aa, Homo sapiens
  Table A; Target 93880; HLA-C*07:01; TUBA3C; ENSG00000198033; TAA
GKEDAANNY

SEQ ID NO: 93881 - protein, 9 aa, Homo sapiens
  Table A; Target 93881; HLA-C*07:04; TUBA3C; ENSG00000198033; TAA
GKEDAANNY

SEQ ID NO: 93882 - protein, 11 aa, Homo sapiens
  Table A; Target 93882; HLA-B*27:02; TUBA3C; ENSG00000198033; TAA
GKEDAANNYAR

SEQ ID NO: 93883 - protein, 11 aa, Homo sapiens
  Table A; Target 93883; HLA-B*27:05; TUBA3C; ENSG00000198033; TAA
GKEDAANNYAR

SEQ ID NO: 93884 - protein, 9 aa, Homo sapiens
  Table A; Target 93884; HLA-B*15:03; TUBA3C; ENSG00000198033; TAA
GKHVPRAVF

SEQ ID NO: 93885 - protein, 8 aa, Homo sapiens
  Table A; Target 93885; HLA-C*04:01; TUBA3C; ENSG00000198033; TAA
GKKSKLEF

SEQ ID NO: 93886 - protein, 9 aa, Homo sapiens
  Table A; Target 93886; HLA-A*02:04; TUBA3C; ENSG00000198033; TAA
GLQGFLIFH

SEQ ID NO: 93887 - protein, 9 aa, Homo sapiens
  Table A; Target 93887; HLA-A*03:01; TUBA3C; ENSG00000198033; TAA
GLQGFLIFH

SEQ ID NO: 93888 - protein, 9 aa, Homo sapiens
  Table A; Target 93888; HLA-A*03:02; TUBA3C; ENSG00000198033; TAA
GLQGFLIFH

SEQ ID NO: 93889 - protein, 9 aa, Homo sapiens
  Table A; Target 93889; HLA-A*31:01; TUBA3C; ENSG00000198033; TAA
GLQGFLIFH

SEQ ID NO: 93890 - protein, 11 aa, Homo sapiens
  Table A; Target 93890; HLA-A*02:04; TUBA3C; ENSG00000198033; TAA
GLQGFLIFHSF

SEQ ID NO: 93891 - protein, 10 aa, Homo sapiens
  Table A; Target 93891; HLA-A*02:01; TUBA3C; ENSG00000198033; TAA
GMEEGEFSEA

SEQ ID NO: 93892 - protein, 10 aa, Homo sapiens
  Table A; Target 93892; HLA-B*39:01; TUBA3C; ENSG00000198033; TAA
GMEEGEFSEA

SEQ ID NO: 93893 - protein, 10 aa, Homo sapiens
  Table A; Target 93893; HLA-B*55:01; TUBA3C; ENSG00000198033; TAA
GMEEGEFSEA

SEQ ID NO: 93894 - protein, 10 aa, Homo sapiens
  Table A; Target 93894; HLA-C*05:01; TUBA3C; ENSG00000198033; TAA
GMEEGEFSEA

SEQ ID NO: 93895 - protein, 9 aa, Homo sapiens
  Table A; Target 93895; HLA-B*13:02; TUBA3C; ENSG00000198033; TAA
GQAGVQIGN

SEQ ID NO: 93896 - protein, 9 aa, Homo sapiens
  Table A; Target 93896; HLA-B*27:05; TUBA3C; ENSG00000198033; TAA
GQAGVQIGN

SEQ ID NO: 93897 - protein, 9 aa, Homo sapiens
  Table A; Target 93897; HLA-C*06:02; TUBA3C; ENSG00000198033; TAA
GQAGVQIGN

SEQ ID NO: 93898 - protein, 9 aa, Homo sapiens
  Table A; Target 93898; HLA-C*07:04; TUBA3C; ENSG00000198033; TAA
GQAGVQIGN

SEQ ID NO: 93899 - protein, 10 aa, Homo sapiens
  Table A; Target 93899; HLA-A*02:03; TUBA3C; ENSG00000198033; TAA
GQAGVQIGNA

SEQ ID NO: 93900 - protein, 10 aa, Homo sapiens
  Table A; Target 93900; HLA-B*13:02; TUBA3C; ENSG00000198033; TAA
GQAGVQIGNA

SEQ ID NO: 93901 - protein, 10 aa, Homo sapiens
  Table A; Target 93901; HLA-B*27:05; TUBA3C; ENSG00000198033; TAA
GQAGVQIGNA

SEQ ID NO: 93902 - protein, 10 aa, Homo sapiens
  Table A; Target 93902; HLA-B*39:01; TUBA3C; ENSG00000198033; TAA
GQAGVQIGNA

SEQ ID NO: 93903 - protein, 10 aa, Homo sapiens
  Table A; Target 93903; HLA-C*06:02; TUBA3C; ENSG00000198033; TAA
GQAGVQIGNA

SEQ ID NO: 93904 - protein, 11 aa, Homo sapiens
  Table A; Target 93904; HLA-B*15:01; TUBA3C; ENSG00000198033; TAA
GQAGVQIGNAC

SEQ ID NO: 93905 - protein, 11 aa, Homo sapiens
  Table A; Target 93905; HLA-B*27:05; TUBA3C; ENSG00000198033; TAA
GQAGVQIGNAC

SEQ ID NO: 93906 - protein, 8 aa, Homo sapiens
  Table A; Target 93906; HLA-B*13:02; TUBA3C; ENSG00000198033; TAA
GQIVSSIT

SEQ ID NO: 93907 - protein, 8 aa, Homo sapiens
  Table A; Target 93907; HLA-B*15:01; TUBA3C; ENSG00000198033; TAA
GQIVSSIT

SEQ ID NO: 93908 - protein, 9 aa, Homo sapiens
  Table A; Target 93908; HLA-A*02:01; TUBA3C; ENSG00000198033; TAA
GQIVSSITA

SEQ ID NO: 93909 - protein, 9 aa, Homo sapiens
  Table A; Target 93909; HLA-A*02:03; TUBA3C; ENSG00000198033; TAA
GQIVSSITA

SEQ ID NO: 93910 - protein, 9 aa, Homo sapiens
  Table A; Target 93910; HLA-A*30:01; TUBA3C; ENSG00000198033; TAA
GQIVSSITA

SEQ ID NO: 93911 - protein, 9 aa, Homo sapiens
  Table A; Target 93911; HLA-A*32:01; TUBA3C; ENSG00000198033; TAA
GQIVSSITA

SEQ ID NO: 93912 - protein, 9 aa, Homo sapiens
  Table A; Target 93912; HLA-B*13:02; TUBA3C; ENSG00000198033; TAA
GQIVSSITA

SEQ ID NO: 93913 - protein, 9 aa, Homo sapiens
  Table A; Target 93913; HLA-B*15:01; TUBA3C; ENSG00000198033; TAA
GQIVSSITA

SEQ ID NO: 93914 - protein, 9 aa, Homo sapiens
  Table A; Target 93914; HLA-B*15:03; TUBA3C; ENSG00000198033; TAA
GQIVSSITA

SEQ ID NO: 93915 - protein, 9 aa, Homo sapiens
  Table A; Target 93915; HLA-B*27:05; TUBA3C; ENSG00000198033; TAA
GQIVSSITA

SEQ ID NO: 93916 - protein, 9 aa, Homo sapiens
  Table A; Target 93916; HLA-B*39:01; TUBA3C; ENSG00000198033; TAA
GQIVSSITA

SEQ ID NO: 93917 - protein, 9 aa, Homo sapiens
  Table A; Target 93917; HLA-B*40:01; TUBA3C; ENSG00000198033; TAA
GQIVSSITA

SEQ ID NO: 93918 - protein, 9 aa, Homo sapiens
  Table A; Target 93918; HLA-B*40:02; TUBA3C; ENSG00000198033; TAA
GQIVSSITA

SEQ ID NO: 93919 - protein, 9 aa, Homo sapiens
  Table A; Target 93919; HLA-B*46:01; TUBA3C; ENSG00000198033; TAA
GQIVSSITA

SEQ ID NO: 93920 - protein, 9 aa, Homo sapiens
  Table A; Target 93920; HLA-B*49:01; TUBA3C; ENSG00000198033; TAA
GQIVSSITA

SEQ ID NO: 93921 - protein, 9 aa, Homo sapiens
  Table A; Target 93921; HLA-B*56:01; TUBA3C; ENSG00000198033; TAA
GQIVSSITA

SEQ ID NO: 93922 - protein, 9 aa, Homo sapiens
  Table A; Target 93922; HLA-C*02:02; TUBA3C; ENSG00000198033; TAA
GQIVSSITA

SEQ ID NO: 93923 - protein, 9 aa, Homo sapiens
  Table A; Target 93923; HLA-C*06:02; TUBA3C; ENSG00000198033; TAA
GQIVSSITA

SEQ ID NO: 93924 - protein, 9 aa, Homo sapiens
  Table A; Target 93924; HLA-C*07:04; TUBA3C; ENSG00000198033; TAA
GQIVSSITA

SEQ ID NO: 93925 - protein, 9 aa, Homo sapiens
  Table A; Target 93925; HLA-C*16:04; TUBA3C; ENSG00000198033; TAA
GQIVSSITA

SEQ ID NO: 93926 - protein, 10 aa, Homo sapiens
  Table A; Target 93926; HLA-B*13:02; TUBA3C; ENSG00000198033; TAA
GQIVSSITAS

SEQ ID NO: 93927 - protein, 10 aa, Homo sapiens
  Table A; Target 93927; HLA-B*15:01; TUBA3C; ENSG00000198033; TAA
GQIVSSITAS

SEQ ID NO: 93928 - protein, 11 aa, Homo sapiens
  Table A; Target 93928; HLA-A*23:01; TUBA3C; ENSG00000198033; TAA
GQIVSSITASL

SEQ ID NO: 93929 - protein, 11 aa, Homo sapiens
  Table A; Target 93929; HLA-A*30:01; TUBA3C; ENSG00000198033; TAA
GQIVSSITASL

SEQ ID NO: 93930 - protein, 11 aa, Homo sapiens
  Table A; Target 93930; HLA-B*13:02; TUBA3C; ENSG00000198033; TAA
GQIVSSITASL

SEQ ID NO: 93931 - protein, 11 aa, Homo sapiens
  Table A; Target 93931; HLA-B*15:01; TUBA3C; ENSG00000198033; TAA
GQIVSSITASL

SEQ ID NO: 93932 - protein, 11 aa, Homo sapiens
  Table A; Target 93932; HLA-B*15:03; TUBA3C; ENSG00000198033; TAA
GQIVSSITASL

SEQ ID NO: 93933 - protein, 11 aa, Homo sapiens
  Table A; Target 93933; HLA-B*27:05; TUBA3C; ENSG00000198033; TAA
GQIVSSITASL

SEQ ID NO: 93934 - protein, 11 aa, Homo sapiens
  Table A; Target 93934; HLA-B*38:01; TUBA3C; ENSG00000198033; TAA
GQIVSSITASL

SEQ ID NO: 93935 - protein, 11 aa, Homo sapiens
  Table A; Target 93935; HLA-B*39:01; TUBA3C; ENSG00000198033; TAA
GQIVSSITASL

SEQ ID NO: 93936 - protein, 11 aa, Homo sapiens
  Table A; Target 93936; HLA-B*40:01; TUBA3C; ENSG00000198033; TAA
GQIVSSITASL

SEQ ID NO: 93937 - protein, 11 aa, Homo sapiens
  Table A; Target 93937; HLA-B*40:02; TUBA3C; ENSG00000198033; TAA
GQIVSSITASL

SEQ ID NO: 93938 - protein, 11 aa, Homo sapiens
  Table A; Target 93938; HLA-B*46:01; TUBA3C; ENSG00000198033; TAA
GQIVSSITASL

SEQ ID NO: 93939 - protein, 11 aa, Homo sapiens
  Table A; Target 93939; HLA-C*03:03; TUBA3C; ENSG00000198033; TAA
GQIVSSITASL

SEQ ID NO: 93940 - protein, 11 aa, Homo sapiens
  Table A; Target 93940; HLA-C*06:02; TUBA3C; ENSG00000198033; TAA
GQIVSSITASL

SEQ ID NO: 93941 - protein, 11 aa, Homo sapiens
  Table A; Target 93941; HLA-C*16:04; TUBA3C; ENSG00000198033; TAA
GQIVSSITASL

SEQ ID NO: 93942 - protein, 9 aa, Homo sapiens
  Table A; Target 93942; HLA-A*02:03; TUBA3C; ENSG00000198033; TAA
GQMPSDKTI

SEQ ID NO: 93943 - protein, 9 aa, Homo sapiens
  Table A; Target 93943; HLA-A*30:01; TUBA3C; ENSG00000198033; TAA
GQMPSDKTI

SEQ ID NO: 93944 - protein, 9 aa, Homo sapiens
  Table A; Target 93944; HLA-B*13:02; TUBA3C; ENSG00000198033; TAA
GQMPSDKTI

SEQ ID NO: 93945 - protein, 9 aa, Homo sapiens
  Table A; Target 93945; HLA-B*15:01; TUBA3C; ENSG00000198033; TAA
GQMPSDKTI

SEQ ID NO: 93946 - protein, 9 aa, Homo sapiens
  Table A; Target 93946; HLA-B*15:03; TUBA3C; ENSG00000198033; TAA
GQMPSDKTI

SEQ ID NO: 93947 - protein, 9 aa, Homo sapiens
  Table A; Target 93947; HLA-B*27:02; TUBA3C; ENSG00000198033; TAA
GQMPSDKTI

SEQ ID NO: 93948 - protein, 9 aa, Homo sapiens
  Table A; Target 93948; HLA-B*27:05; TUBA3C; ENSG00000198033; TAA
GQMPSDKTI

SEQ ID NO: 93949 - protein, 9 aa, Homo sapiens
  Table A; Target 93949; HLA-B*38:01; TUBA3C; ENSG00000198033; TAA
GQMPSDKTI

SEQ ID NO: 93950 - protein, 9 aa, Homo sapiens
  Table A; Target 93950; HLA-B*39:01; TUBA3C; ENSG00000198033; TAA
GQMPSDKTI

SEQ ID NO: 93951 - protein, 9 aa, Homo sapiens
  Table A; Target 93951; HLA-B*40:02; TUBA3C; ENSG00000198033; TAA
GQMPSDKTI

SEQ ID NO: 93952 - protein, 9 aa, Homo sapiens
  Table A; Target 93952; HLA-B*44:02; TUBA3C; ENSG00000198033; TAA
GQMPSDKTI

SEQ ID NO: 93953 - protein, 9 aa, Homo sapiens
  Table A; Target 93953; HLA-B*44:03; TUBA3C; ENSG00000198033; TAA
GQMPSDKTI

SEQ ID NO: 93954 - protein, 9 aa, Homo sapiens
  Table A; Target 93954; HLA-B*49:01; TUBA3C; ENSG00000198033; TAA
GQMPSDKTI

SEQ ID NO: 93955 - protein, 9 aa, Homo sapiens
  Table A; Target 93955; HLA-C*03:03; TUBA3C; ENSG00000198033; TAA
GQMPSDKTI

SEQ ID NO: 93956 - protein, 9 aa, Homo sapiens
  Table A; Target 93956; HLA-C*03:04; TUBA3C; ENSG00000198033; TAA
GQMPSDKTI

SEQ ID NO: 93957 - protein, 9 aa, Homo sapiens
  Table A; Target 93957; HLA-C*06:02; TUBA3C; ENSG00000198033; TAA
GQMPSDKTI

SEQ ID NO: 93958 - protein, 9 aa, Homo sapiens
  Table A; Target 93958; HLA-C*07:04; TUBA3C; ENSG00000198033; TAA
GQMPSDKTI

SEQ ID NO: 93959 - protein, 9 aa, Homo sapiens
  Table A; Target 93959; HLA-C*16:02; TUBA3C; ENSG00000198033; TAA
GQMPSDKTI

SEQ ID NO: 93960 - protein, 9 aa, Homo sapiens
  Table A; Target 93960; HLA-C*16:04; TUBA3C; ENSG00000198033; TAA
GQMPSDKTI

SEQ ID NO: 93961 - protein, 11 aa, Homo sapiens
  Table A; Target 93961; HLA-B*13:02; TUBA3C; ENSG00000198033; TAA
GQMPSDKTIGG

SEQ ID NO: 93962 - protein, 11 aa, Homo sapiens
  Table A; Target 93962; HLA-B*15:01; TUBA3C; ENSG00000198033; TAA
GQMPSDKTIGG

SEQ ID NO: 93963 - protein, 8 aa, Homo sapiens
  Table A; Target 93963; HLA-C*07:04; TUBA3C; ENSG00000198033; TAA
GSGFASLL

SEQ ID NO: 93964 - protein, 8 aa, Homo sapiens
  Table A; Target 93964; HLA-C*12:03; TUBA3C; ENSG00000198033; TAA
GSGFASLL

SEQ ID NO: 93965 - protein, 11 aa, Homo sapiens
  Table A; Target 93965; HLA-A*11:01; TUBA3C; ENSG00000198033; TAA
GSGFASLLMER

SEQ ID NO: 93966 - protein, 11 aa, Homo sapiens
  Table A; Target 93966; HLA-A*31:01; TUBA3C; ENSG00000198033; TAA
GSGFASLLMER

SEQ ID NO: 93967 - protein, 9 aa, Homo sapiens
  Table A; Target 93967; HLA-A*02:03; TUBA3C; ENSG00000198033; TAA
GTGSGFASL

SEQ ID NO: 93968 - protein, 9 aa, Homo sapiens
  Table A; Target 93968; HLA-A*03:01; TUBA3C; ENSG00000198033; TAA
GTGSGFASL

SEQ ID NO: 93969 - protein, 9 aa, Homo sapiens
  Table A; Target 93969; HLA-A*03:02; TUBA3C; ENSG00000198033; TAA
GTGSGFASL

SEQ ID NO: 93970 - protein, 9 aa, Homo sapiens
  Table A; Target 93970; HLA-A*11:01; TUBA3C; ENSG00000198033; TAA
GTGSGFASL

SEQ ID NO: 93971 - protein, 9 aa, Homo sapiens
  Table A; Target 93971; HLA-A*24:02; TUBA3C; ENSG00000198033; TAA
GTGSGFASL

SEQ ID NO: 93972 - protein, 9 aa, Homo sapiens
  Table A; Target 93972; HLA-A*25:01; TUBA3C; ENSG00000198033; TAA
GTGSGFASL

SEQ ID NO: 93973 - protein, 9 aa, Homo sapiens
  Table A; Target 93973; HLA-A*26:01; TUBA3C; ENSG00000198033; TAA
GTGSGFASL

SEQ ID NO: 93974 - protein, 9 aa, Homo sapiens
  Table A; Target 93974; HLA-A*30:01; TUBA3C; ENSG00000198033; TAA
GTGSGFASL

SEQ ID NO: 93975 - protein, 9 aa, Homo sapiens
  Table A; Target 93975; HLA-A*31:01; TUBA3C; ENSG00000198033; TAA
GTGSGFASL

SEQ ID NO: 93976 - protein, 9 aa, Homo sapiens
  Table A; Target 93976; HLA-A*32:01; TUBA3C; ENSG00000198033; TAA
GTGSGFASL

SEQ ID NO: 93977 - protein, 9 aa, Homo sapiens
  Table A; Target 93977; HLA-B*07:02; TUBA3C; ENSG00000198033; TAA
GTGSGFASL

SEQ ID NO: 93978 - protein, 9 aa, Homo sapiens
  Table A; Target 93978; HLA-B*15:01; TUBA3C; ENSG00000198033; TAA
GTGSGFASL

SEQ ID NO: 93979 - protein, 9 aa, Homo sapiens
  Table A; Target 93979; HLA-B*15:03; TUBA3C; ENSG00000198033; TAA
GTGSGFASL

SEQ ID NO: 93980 - protein, 9 aa, Homo sapiens
  Table A; Target 93980; HLA-B*27:05; TUBA3C; ENSG00000198033; TAA
GTGSGFASL

SEQ ID NO: 93981 - protein, 9 aa, Homo sapiens
  Table A; Target 93981; HLA-B*39:01; TUBA3C; ENSG00000198033; TAA
GTGSGFASL

SEQ ID NO: 93982 - protein, 9 aa, Homo sapiens
  Table A; Target 93982; HLA-B*40:01; TUBA3C; ENSG00000198033; TAA
GTGSGFASL

SEQ ID NO: 93983 - protein, 9 aa, Homo sapiens
  Table A; Target 93983; HLA-B*40:02; TUBA3C; ENSG00000198033; TAA
GTGSGFASL

SEQ ID NO: 93984 - protein, 9 aa, Homo sapiens
  Table A; Target 93984; HLA-B*46:01; TUBA3C; ENSG00000198033; TAA
GTGSGFASL

SEQ ID NO: 93985 - protein, 9 aa, Homo sapiens
  Table A; Target 93985; HLA-B*58:01; TUBA3C; ENSG00000198033; TAA
GTGSGFASL

SEQ ID NO: 93986 - protein, 9 aa, Homo sapiens
  Table A; Target 93986; HLA-C*01:02; TUBA3C; ENSG00000198033; TAA
GTGSGFASL

SEQ ID NO: 93987 - protein, 9 aa, Homo sapiens
  Table A; Target 93987; HLA-C*02:02; TUBA3C; ENSG00000198033; TAA
GTGSGFASL

SEQ ID NO: 93988 - protein, 9 aa, Homo sapiens
  Table A; Target 93988; HLA-C*03:03; TUBA3C; ENSG00000198033; TAA
GTGSGFASL

SEQ ID NO: 93989 - protein, 9 aa, Homo sapiens
  Table A; Target 93989; HLA-C*03:04; TUBA3C; ENSG00000198033; TAA
GTGSGFASL

SEQ ID NO: 93990 - protein, 9 aa, Homo sapiens
  Table A; Target 93990; HLA-C*06:02; TUBA3C; ENSG00000198033; TAA
GTGSGFASL

SEQ ID NO: 93991 - protein, 9 aa, Homo sapiens
  Table A; Target 93991; HLA-C*07:01; TUBA3C; ENSG00000198033; TAA
GTGSGFASL

SEQ ID NO: 93992 - protein, 9 aa, Homo sapiens
  Table A; Target 93992; HLA-C*07:02; TUBA3C; ENSG00000198033; TAA
GTGSGFASL

SEQ ID NO: 93993 - protein, 9 aa, Homo sapiens
  Table A; Target 93993; HLA-C*07:04; TUBA3C; ENSG00000198033; TAA
GTGSGFASL

SEQ ID NO: 93994 - protein, 9 aa, Homo sapiens
  Table A; Target 93994; HLA-C*12:03; TUBA3C; ENSG00000198033; TAA
GTGSGFASL

SEQ ID NO: 93995 - protein, 9 aa, Homo sapiens
  Table A; Target 93995; HLA-C*14:02; TUBA3C; ENSG00000198033; TAA
GTGSGFASL

SEQ ID NO: 93996 - protein, 9 aa, Homo sapiens
  Table A; Target 93996; HLA-C*16:04; TUBA3C; ENSG00000198033; TAA
GTGSGFASL

SEQ ID NO: 93997 - protein, 10 aa, Homo sapiens
  Table A; Target 93997; HLA-A*03:01; TUBA3C; ENSG00000198033; TAA
GTGSGFASLL

SEQ ID NO: 93998 - protein, 10 aa, Homo sapiens
  Table A; Target 93998; HLA-A*03:02; TUBA3C; ENSG00000198033; TAA
GTGSGFASLL

SEQ ID NO: 93999 - protein, 10 aa, Homo sapiens
  Table A; Target 93999; HLA-A*11:01; TUBA3C; ENSG00000198033; TAA
GTGSGFASLL

SEQ ID NO: 94000 - protein, 10 aa, Homo sapiens
  Table A; Target 94000; HLA-A*68:02; TUBA3C; ENSG00000198033; TAA
GTGSGFASLL

SEQ ID NO: 94001 - protein, 10 aa, Homo sapiens
  Table A; Target 94001; HLA-B*07:02; TUBA3C; ENSG00000198033; TAA
GTGSGFASLL

SEQ ID NO: 94002 - protein, 10 aa, Homo sapiens
  Table A; Target 94002; HLA-B*40:02; TUBA3C; ENSG00000198033; TAA
GTGSGFASLL

SEQ ID NO: 94003 - protein, 10 aa, Homo sapiens
  Table A; Target 94003; HLA-C*06:02; TUBA3C; ENSG00000198033; TAA
GTGSGFASLL

SEQ ID NO: 94004 - protein, 10 aa, Homo sapiens
  Table A; Target 94004; HLA-C*07:01; TUBA3C; ENSG00000198033; TAA
GTGSGFASLL

SEQ ID NO: 94005 - protein, 10 aa, Homo sapiens
  Table A; Target 94005; HLA-C*07:02; TUBA3C; ENSG00000198033; TAA
GTGSGFASLL

SEQ ID NO: 94006 - protein, 10 aa, Homo sapiens
  Table A; Target 94006; HLA-C*07:04; TUBA3C; ENSG00000198033; TAA
GTGSGFASLL

SEQ ID NO: 94007 - protein, 10 aa, Homo sapiens
  Table A; Target 94007; HLA-C*12:03; TUBA3C; ENSG00000198033; TAA
GTGSGFASLL

SEQ ID NO: 94008 - protein, 9 aa, Homo sapiens
  Table A; Target 94008; HLA-A*02:07; TUBA3C; ENSG00000198033; TAA
GVDSVEAEA

SEQ ID NO: 94009 - protein, 9 aa, Homo sapiens
  Table A; Target 94009; HLA-B*39:01; TUBA3C; ENSG00000198033; TAA
GVDSVEAEA

SEQ ID NO: 94010 - protein, 9 aa, Homo sapiens
  Table A; Target 94010; HLA-C*05:01; TUBA3C; ENSG00000198033; TAA
GVDSVEAEA

SEQ ID NO: 94011 - protein, 9 aa, Homo sapiens
  Table A; Target 94011; HLA-A*25:01; TUBA3C; ENSG00000198033; TAA
GVQIGNACW

SEQ ID NO: 94012 - protein, 9 aa, Homo sapiens
  Table A; Target 94012; HLA-A*32:01; TUBA3C; ENSG00000198033; TAA
GVQIGNACW

SEQ ID NO: 94013 - protein, 9 aa, Homo sapiens
  Table A; Target 94013; HLA-B*15:01; TUBA3C; ENSG00000198033; TAA
GVQIGNACW

SEQ ID NO: 94014 - protein, 9 aa, Homo sapiens
  Table A; Target 94014; HLA-B*44:02; TUBA3C; ENSG00000198033; TAA
GVQIGNACW

SEQ ID NO: 94015 - protein, 9 aa, Homo sapiens
  Table A; Target 94015; HLA-B*57:01; TUBA3C; ENSG00000198033; TAA
GVQIGNACW

SEQ ID NO: 94016 - protein, 9 aa, Homo sapiens
  Table A; Target 94016; HLA-B*58:01; TUBA3C; ENSG00000198033; TAA
GVQIGNACW

SEQ ID NO: 94017 - protein, 8 aa, Homo sapiens
  Table A; Target 94017; HLA-B*18:01; TUBA3C; ENSG00000198033; TAA
HEQLSVAE

SEQ ID NO: 94018 - protein, 9 aa, Homo sapiens
  Table A; Target 94018; HLA-A*30:01; TUBA3C; ENSG00000198033; TAA
HEQLSVAEI

SEQ ID NO: 94019 - protein, 9 aa, Homo sapiens
  Table A; Target 94019; HLA-A*68:02; TUBA3C; ENSG00000198033; TAA
HEQLSVAEI

SEQ ID NO: 94020 - protein, 9 aa, Homo sapiens
  Table A; Target 94020; HLA-B*07:02; TUBA3C; ENSG00000198033; TAA
HEQLSVAEI

SEQ ID NO: 94021 - protein, 9 aa, Homo sapiens
  Table A; Target 94021; HLA-B*08:01; TUBA3C; ENSG00000198033; TAA
HEQLSVAEI

SEQ ID NO: 94022 - protein, 9 aa, Homo sapiens
  Table A; Target 94022; HLA-B*13:02; TUBA3C; ENSG00000198033; TAA
HEQLSVAEI

SEQ ID NO: 94023 - protein, 9 aa, Homo sapiens
  Table A; Target 94023; HLA-B*15:03; TUBA3C; ENSG00000198033; TAA
HEQLSVAEI

SEQ ID NO: 94024 - protein, 9 aa, Homo sapiens
  Table A; Target 94024; HLA-B*18:01; TUBA3C; ENSG00000198033; TAA
HEQLSVAEI

SEQ ID NO: 94025 - protein, 9 aa, Homo sapiens
  Table A; Target 94025; HLA-B*27:02; TUBA3C; ENSG00000198033; TAA
HEQLSVAEI

SEQ ID NO: 94026 - protein, 9 aa, Homo sapiens
  Table A; Target 94026; HLA-B*27:05; TUBA3C; ENSG00000198033; TAA
HEQLSVAEI

SEQ ID NO: 94027 - protein, 9 aa, Homo sapiens
  Table A; Target 94027; HLA-B*37:01; TUBA3C; ENSG00000198033; TAA
HEQLSVAEI

SEQ ID NO: 94028 - protein, 9 aa, Homo sapiens
  Table A; Target 94028; HLA-B*38:01; TUBA3C; ENSG00000198033; TAA
HEQLSVAEI

SEQ ID NO: 94029 - protein, 9 aa, Homo sapiens
  Table A; Target 94029; HLA-B*39:01; TUBA3C; ENSG00000198033; TAA
HEQLSVAEI

SEQ ID NO: 94030 - protein, 9 aa, Homo sapiens
  Table A; Target 94030; HLA-B*40:01; TUBA3C; ENSG00000198033; TAA
HEQLSVAEI

SEQ ID NO: 94031 - protein, 9 aa, Homo sapiens
  Table A; Target 94031; HLA-B*40:02; TUBA3C; ENSG00000198033; TAA
HEQLSVAEI

SEQ ID NO: 94032 - protein, 9 aa, Homo sapiens
  Table A; Target 94032; HLA-B*44:02; TUBA3C; ENSG00000198033; TAA
HEQLSVAEI

SEQ ID NO: 94033 - protein, 9 aa, Homo sapiens
  Table A; Target 94033; HLA-B*44:03; TUBA3C; ENSG00000198033; TAA
HEQLSVAEI

SEQ ID NO: 94034 - protein, 9 aa, Homo sapiens
  Table A; Target 94034; HLA-B*49:01; TUBA3C; ENSG00000198033; TAA
HEQLSVAEI

SEQ ID NO: 94035 - protein, 9 aa, Homo sapiens
  Table A; Target 94035; HLA-B*51:01; TUBA3C; ENSG00000198033; TAA
HEQLSVAEI

SEQ ID NO: 94036 - protein, 9 aa, Homo sapiens
  Table A; Target 94036; HLA-C*02:02; TUBA3C; ENSG00000198033; TAA
HEQLSVAEI

SEQ ID NO: 94037 - protein, 9 aa, Homo sapiens
  Table A; Target 94037; HLA-C*04:01; TUBA3C; ENSG00000198033; TAA
HEQLSVAEI

SEQ ID NO: 94038 - protein, 9 aa, Homo sapiens
  Table A; Target 94038; HLA-C*06:02; TUBA3C; ENSG00000198033; TAA
HEQLSVAEI

SEQ ID NO: 94039 - protein, 9 aa, Homo sapiens
  Table A; Target 94039; HLA-C*07:01; TUBA3C; ENSG00000198033; TAA
HEQLSVAEI

SEQ ID NO: 94040 - protein, 9 aa, Homo sapiens
  Table A; Target 94040; HLA-C*07:02; TUBA3C; ENSG00000198033; TAA
HEQLSVAEI

SEQ ID NO: 94041 - protein, 9 aa, Homo sapiens
  Table A; Target 94041; HLA-C*07:04; TUBA3C; ENSG00000198033; TAA
HEQLSVAEI

SEQ ID NO: 94042 - protein, 9 aa, Homo sapiens
  Table A; Target 94042; HLA-C*12:03; TUBA3C; ENSG00000198033; TAA
HEQLSVAEI

SEQ ID NO: 94043 - protein, 9 aa, Homo sapiens
  Table A; Target 94043; HLA-C*16:02; TUBA3C; ENSG00000198033; TAA
HEQLSVAEI

SEQ ID NO: 94044 - protein, 9 aa, Homo sapiens
  Table A; Target 94044; HLA-C*16:04; TUBA3C; ENSG00000198033; TAA
HEQLSVAEI

SEQ ID NO: 94045 - protein, 9 aa, Homo sapiens
  Table A; Target 94045; HLA-B*35:01; TUBA3C; ENSG00000198033; TAA
HGIQPDGQM

SEQ ID NO: 94046 - protein, 9 aa, Homo sapiens
  Table A; Target 94046; HLA-B*35:03; TUBA3C; ENSG00000198033; TAA
HGIQPDGQM

SEQ ID NO: 94047 - protein, 9 aa, Homo sapiens
  Table A; Target 94047; HLA-C*03:03; TUBA3C; ENSG00000198033; TAA
HGIQPDGQM

SEQ ID NO: 94048 - protein, 9 aa, Homo sapiens
  Table A; Target 94048; HLA-C*03:04; TUBA3C; ENSG00000198033; TAA
HGIQPDGQM

SEQ ID NO: 94049 - protein, 10 aa, Homo sapiens
  Table A; Target 94049; HLA-B*27:05; TUBA3C; ENSG00000198033; TAA
HGIQPDGQMP

SEQ ID NO: 94050 - protein, 10 aa, Homo sapiens
  Table A; Target 94050; HLA-C*04:01; TUBA3C; ENSG00000198033; TAA
HGIQPDGQMP

SEQ ID NO: 94051 - protein, 11 aa, Homo sapiens
  Table A; Target 94051; HLA-C*04:01; TUBA3C; ENSG00000198033; TAA
HGIQPDGQMPS

SEQ ID NO: 94052 - protein, 8 aa, Homo sapiens
  Table A; Target 94052; HLA-B*55:01; TUBA3C; ENSG00000198033; TAA
HPEQLITG

SEQ ID NO: 94053 - protein, 8 aa, Homo sapiens
  Table A; Target 94053; HLA-C*04:01; TUBA3C; ENSG00000198033; TAA
HPEQLITG

SEQ ID NO: 94054 - protein, 9 aa, Homo sapiens
  Table A; Target 94054; HLA-A*01:01; TUBA3C; ENSG00000198033; TAA
HPEQLITGK

SEQ ID NO: 94055 - protein, 9 aa, Homo sapiens
  Table A; Target 94055; HLA-A*03:02; TUBA3C; ENSG00000198033; TAA
HPEQLITGK

SEQ ID NO: 94056 - protein, 9 aa, Homo sapiens
  Table A; Target 94056; HLA-A*11:01; TUBA3C; ENSG00000198033; TAA
HPEQLITGK

SEQ ID NO: 94057 - protein, 9 aa, Homo sapiens
  Table A; Target 94057; HLA-A*68:01; TUBA3C; ENSG00000198033; TAA
HPEQLITGK

SEQ ID NO: 94058 - protein, 9 aa, Homo sapiens
  Table A; Target 94058; HLA-B*27:02; TUBA3C; ENSG00000198033; TAA
HPEQLITGK

SEQ ID NO: 94059 - protein, 9 aa, Homo sapiens
  Table A; Target 94059; HLA-B*35:01; TUBA3C; ENSG00000198033; TAA
HPEQLITGK

SEQ ID NO: 94060 - protein, 9 aa, Homo sapiens
  Table A; Target 94060; HLA-B*35:03; TUBA3C; ENSG00000198033; TAA
HPEQLITGK

SEQ ID NO: 94061 - protein, 9 aa, Homo sapiens
  Table A; Target 94061; HLA-B*55:01; TUBA3C; ENSG00000198033; TAA
HPEQLITGK

SEQ ID NO: 94062 - protein, 9 aa, Homo sapiens
  Table A; Target 94062; HLA-B*56:01; TUBA3C; ENSG00000198033; TAA
HPEQLITGK

SEQ ID NO: 94063 - protein, 9 aa, Homo sapiens
  Table A; Target 94063; HLA-C*07:01; TUBA3C; ENSG00000198033; TAA
HPEQLITGK

SEQ ID NO: 94064 - protein, 9 aa, Homo sapiens
  Table A; Target 94064; HLA-C*07:06; TUBA3C; ENSG00000198033; TAA
HPEQLITGK

SEQ ID NO: 94065 - protein, 8 aa, Homo sapiens
  Table A; Target 94065; HLA-B*40:02; TUBA3C; ENSG00000198033; TAA
HSFGGGTG

SEQ ID NO: 94066 - protein, 8 aa, Homo sapiens
  Table A; Target 94066; HLA-C*04:01; TUBA3C; ENSG00000198033; TAA
HSFGGGTG

SEQ ID NO: 94067 - protein, 8 aa, Homo sapiens
  Table A; Target 94067; HLA-C*06:02; TUBA3C; ENSG00000198033; TAA
HSFGGGTG

SEQ ID NO: 94068 - protein, 8 aa, Homo sapiens
  Table A; Target 94068; HLA-C*07:01; TUBA3C; ENSG00000198033; TAA
HSFGGGTG

SEQ ID NO: 94069 - protein, 8 aa, Homo sapiens
  Table A; Target 94069; HLA-C*07:04; TUBA3C; ENSG00000198033; TAA
HSFGGGTG

SEQ ID NO: 94070 - protein, 8 aa, Homo sapiens
  Table A; Target 94070; HLA-C*12:03; TUBA3C; ENSG00000198033; TAA
HSFGGGTG

SEQ ID NO: 94071 - protein, 10 aa, Homo sapiens
  Table A; Target 94071; HLA-A*26:01; TUBA3C; ENSG00000198033; TAA
HSFGGGTGSG

SEQ ID NO: 94072 - protein, 10 aa, Homo sapiens
  Table A; Target 94072; HLA-B*27:05; TUBA3C; ENSG00000198033; TAA
HSFGGGTGSG

SEQ ID NO: 94073 - protein, 10 aa, Homo sapiens
  Table A; Target 94073; HLA-B*39:01; TUBA3C; ENSG00000198033; TAA
HSFGGGTGSG

SEQ ID NO: 94074 - protein, 10 aa, Homo sapiens
  Table A; Target 94074; HLA-B*40:02; TUBA3C; ENSG00000198033; TAA
HSFGGGTGSG

SEQ ID NO: 94075 - protein, 10 aa, Homo sapiens
  Table A; Target 94075; HLA-B*46:01; TUBA3C; ENSG00000198033; TAA
HSFGGGTGSG

SEQ ID NO: 94076 - protein, 10 aa, Homo sapiens
  Table A; Target 94076; HLA-C*01:02; TUBA3C; ENSG00000198033; TAA
HSFGGGTGSG

SEQ ID NO: 94077 - protein, 10 aa, Homo sapiens
  Table A; Target 94077; HLA-C*04:01; TUBA3C; ENSG00000198033; TAA
HSFGGGTGSG

SEQ ID NO: 94078 - protein, 10 aa, Homo sapiens
  Table A; Target 94078; HLA-C*06:02; TUBA3C; ENSG00000198033; TAA
HSFGGGTGSG

SEQ ID NO: 94079 - protein, 10 aa, Homo sapiens
  Table A; Target 94079; HLA-C*07:01; TUBA3C; ENSG00000198033; TAA
HSFGGGTGSG

SEQ ID NO: 94080 - protein, 10 aa, Homo sapiens
  Table A; Target 94080; HLA-C*07:02; TUBA3C; ENSG00000198033; TAA
HSFGGGTGSG

SEQ ID NO: 94081 - protein, 10 aa, Homo sapiens
  Table A; Target 94081; HLA-C*12:03; TUBA3C; ENSG00000198033; TAA
HSFGGGTGSG

SEQ ID NO: 94082 - protein, 10 aa, Homo sapiens
  Table A; Target 94082; HLA-C*16:02; TUBA3C; ENSG00000198033; TAA
HSFGGGTGSG

SEQ ID NO: 94083 - protein, 10 aa, Homo sapiens
  Table A; Target 94083; HLA-C*16:04; TUBA3C; ENSG00000198033; TAA
HSFGGGTGSG

SEQ ID NO: 94084 - protein, 11 aa, Homo sapiens
  Table A; Target 94084; HLA-A*01:01; TUBA3C; ENSG00000198033; TAA
HSFGGGTGSGF

SEQ ID NO: 94085 - protein, 11 aa, Homo sapiens
  Table A; Target 94085; HLA-A*23:01; TUBA3C; ENSG00000198033; TAA
HSFGGGTGSGF

SEQ ID NO: 94086 - protein, 11 aa, Homo sapiens
  Table A; Target 94086; HLA-A*25:01; TUBA3C; ENSG00000198033; TAA
HSFGGGTGSGF

SEQ ID NO: 94087 - protein, 11 aa, Homo sapiens
  Table A; Target 94087; HLA-A*26:01; TUBA3C; ENSG00000198033; TAA
HSFGGGTGSGF

SEQ ID NO: 94088 - protein, 11 aa, Homo sapiens
  Table A; Target 94088; HLA-A*29:02; TUBA3C; ENSG00000198033; TAA
HSFGGGTGSGF

SEQ ID NO: 94089 - protein, 11 aa, Homo sapiens
  Table A; Target 94089; HLA-A*30:02; TUBA3C; ENSG00000198033; TAA
HSFGGGTGSGF

SEQ ID NO: 94090 - protein, 11 aa, Homo sapiens
  Table A; Target 94090; HLA-A*31:01; TUBA3C; ENSG00000198033; TAA
HSFGGGTGSGF

SEQ ID NO: 94091 - protein, 11 aa, Homo sapiens
  Table A; Target 94091; HLA-A*32:01; TUBA3C; ENSG00000198033; TAA
HSFGGGTGSGF

SEQ ID NO: 94092 - protein, 11 aa, Homo sapiens
  Table A; Target 94092; HLA-A*33:01; TUBA3C; ENSG00000198033; TAA
HSFGGGTGSGF

SEQ ID NO: 94093 - protein, 11 aa, Homo sapiens
  Table A; Target 94093; HLA-A*33:03; TUBA3C; ENSG00000198033; TAA
HSFGGGTGSGF

SEQ ID NO: 94094 - protein, 11 aa, Homo sapiens
  Table A; Target 94094; HLA-A*68:01; TUBA3C; ENSG00000198033; TAA
HSFGGGTGSGF

SEQ ID NO: 94095 - protein, 11 aa, Homo sapiens
  Table A; Target 94095; HLA-A*68:02; TUBA3C; ENSG00000198033; TAA
HSFGGGTGSGF

SEQ ID NO: 94096 - protein, 11 aa, Homo sapiens
  Table A; Target 94096; HLA-B*15:01; TUBA3C; ENSG00000198033; TAA
HSFGGGTGSGF

SEQ ID NO: 94097 - protein, 11 aa, Homo sapiens
  Table A; Target 94097; HLA-B*15:03; TUBA3C; ENSG00000198033; TAA
HSFGGGTGSGF

SEQ ID NO: 94098 - protein, 11 aa, Homo sapiens
  Table A; Target 94098; HLA-B*27:02; TUBA3C; ENSG00000198033; TAA
HSFGGGTGSGF

SEQ ID NO: 94099 - protein, 11 aa, Homo sapiens
  Table A; Target 94099; HLA-B*27:05; TUBA3C; ENSG00000198033; TAA
HSFGGGTGSGF

SEQ ID NO: 94100 - protein, 11 aa, Homo sapiens
  Table A; Target 94100; HLA-B*35:01; TUBA3C; ENSG00000198033; TAA
HSFGGGTGSGF

SEQ ID NO: 94101 - protein, 11 aa, Homo sapiens
  Table A; Target 94101; HLA-B*35:03; TUBA3C; ENSG00000198033; TAA
HSFGGGTGSGF

SEQ ID NO: 94102 - protein, 11 aa, Homo sapiens
  Table A; Target 94102; HLA-B*38:01; TUBA3C; ENSG00000198033; TAA
HSFGGGTGSGF

SEQ ID NO: 94103 - protein, 11 aa, Homo sapiens
  Table A; Target 94103; HLA-B*39:01; TUBA3C; ENSG00000198033; TAA
HSFGGGTGSGF

SEQ ID NO: 94104 - protein, 11 aa, Homo sapiens
  Table A; Target 94104; HLA-B*40:02; TUBA3C; ENSG00000198033; TAA
HSFGGGTGSGF

SEQ ID NO: 94105 - protein, 11 aa, Homo sapiens
  Table A; Target 94105; HLA-B*46:01; TUBA3C; ENSG00000198033; TAA
HSFGGGTGSGF

SEQ ID NO: 94106 - protein, 11 aa, Homo sapiens
  Table A; Target 94106; HLA-B*54:01; TUBA3C; ENSG00000198033; TAA
HSFGGGTGSGF

SEQ ID NO: 94107 - protein, 11 aa, Homo sapiens
  Table A; Target 94107; HLA-B*55:01; TUBA3C; ENSG00000198033; TAA
HSFGGGTGSGF

SEQ ID NO: 94108 - protein, 11 aa, Homo sapiens
  Table A; Target 94108; HLA-B*57:01; TUBA3C; ENSG00000198033; TAA
HSFGGGTGSGF

SEQ ID NO: 94109 - protein, 11 aa, Homo sapiens
  Table A; Target 94109; HLA-B*58:01; TUBA3C; ENSG00000198033; TAA
HSFGGGTGSGF

SEQ ID NO: 94110 - protein, 11 aa, Homo sapiens
  Table A; Target 94110; HLA-C*01:02; TUBA3C; ENSG00000198033; TAA
HSFGGGTGSGF

SEQ ID NO: 94111 - protein, 11 aa, Homo sapiens
  Table A; Target 94111; HLA-C*02:02; TUBA3C; ENSG00000198033; TAA
HSFGGGTGSGF

SEQ ID NO: 94112 - protein, 11 aa, Homo sapiens
  Table A; Target 94112; HLA-C*03:03; TUBA3C; ENSG00000198033; TAA
HSFGGGTGSGF

SEQ ID NO: 94113 - protein, 11 aa, Homo sapiens
  Table A; Target 94113; HLA-C*03:04; TUBA3C; ENSG00000198033; TAA
HSFGGGTGSGF

SEQ ID NO: 94114 - protein, 11 aa, Homo sapiens
  Table A; Target 94114; HLA-C*04:01; TUBA3C; ENSG00000198033; TAA
HSFGGGTGSGF

SEQ ID NO: 94115 - protein, 11 aa, Homo sapiens
  Table A; Target 94115; HLA-C*05:01; TUBA3C; ENSG00000198033; TAA
HSFGGGTGSGF

SEQ ID NO: 94116 - protein, 11 aa, Homo sapiens
  Table A; Target 94116; HLA-C*06:02; TUBA3C; ENSG00000198033; TAA
HSFGGGTGSGF

SEQ ID NO: 94117 - protein, 11 aa, Homo sapiens
  Table A; Target 94117; HLA-C*07:01; TUBA3C; ENSG00000198033; TAA
HSFGGGTGSGF

SEQ ID NO: 94118 - protein, 11 aa, Homo sapiens
  Table A; Target 94118; HLA-C*07:02; TUBA3C; ENSG00000198033; TAA
HSFGGGTGSGF

SEQ ID NO: 94119 - protein, 11 aa, Homo sapiens
  Table A; Target 94119; HLA-C*07:04; TUBA3C; ENSG00000198033; TAA
HSFGGGTGSGF

SEQ ID NO: 94120 - protein, 11 aa, Homo sapiens
  Table A; Target 94120; HLA-C*07:06; TUBA3C; ENSG00000198033; TAA
HSFGGGTGSGF

SEQ ID NO: 94121 - protein, 11 aa, Homo sapiens
  Table A; Target 94121; HLA-C*12:03; TUBA3C; ENSG00000198033; TAA
HSFGGGTGSGF

SEQ ID NO: 94122 - protein, 11 aa, Homo sapiens
  Table A; Target 94122; HLA-C*14:02; TUBA3C; ENSG00000198033; TAA
HSFGGGTGSGF

SEQ ID NO: 94123 - protein, 11 aa, Homo sapiens
  Table A; Target 94123; HLA-C*16:01; TUBA3C; ENSG00000198033; TAA
HSFGGGTGSGF

SEQ ID NO: 94124 - protein, 11 aa, Homo sapiens
  Table A; Target 94124; HLA-C*16:02; TUBA3C; ENSG00000198033; TAA
HSFGGGTGSGF

SEQ ID NO: 94125 - protein, 11 aa, Homo sapiens
  Table A; Target 94125; HLA-C*16:04; TUBA3C; ENSG00000198033; TAA
HSFGGGTGSGF

SEQ ID NO: 94126 - protein, 8 aa, Homo sapiens
  Table A; Target 94126; HLA-C*04:01; TUBA3C; ENSG00000198033; TAA
HVGQAGVQ

SEQ ID NO: 94127 - protein, 8 aa, Homo sapiens
  Table A; Target 94127; HLA-C*07:01; TUBA3C; ENSG00000198033; TAA
HVGQAGVQ

SEQ ID NO: 94128 - protein, 8 aa, Homo sapiens
  Table A; Target 94128; HLA-C*12:03; TUBA3C; ENSG00000198033; TAA
HVGQAGVQ

SEQ ID NO: 94129 - protein, 9 aa, Homo sapiens
  Table A; Target 94129; HLA-A*25:01; TUBA3C; ENSG00000198033; TAA
HVGQAGVQI

SEQ ID NO: 94130 - protein, 9 aa, Homo sapiens
  Table A; Target 94130; HLA-A*26:01; TUBA3C; ENSG00000198033; TAA
HVGQAGVQI

SEQ ID NO: 94131 - protein, 9 aa, Homo sapiens
  Table A; Target 94131; HLA-A*33:03; TUBA3C; ENSG00000198033; TAA
HVGQAGVQI

SEQ ID NO: 94132 - protein, 9 aa, Homo sapiens
  Table A; Target 94132; HLA-A*68:01; TUBA3C; ENSG00000198033; TAA
HVGQAGVQI

SEQ ID NO: 94133 - protein, 9 aa, Homo sapiens
  Table A; Target 94133; HLA-A*68:02; TUBA3C; ENSG00000198033; TAA
HVGQAGVQI

SEQ ID NO: 94134 - protein, 9 aa, Homo sapiens
  Table A; Target 94134; HLA-B*13:02; TUBA3C; ENSG00000198033; TAA
HVGQAGVQI

SEQ ID NO: 94135 - protein, 9 aa, Homo sapiens
  Table A; Target 94135; HLA-B*27:05; TUBA3C; ENSG00000198033; TAA
HVGQAGVQI

SEQ ID NO: 94136 - protein, 9 aa, Homo sapiens
  Table A; Target 94136; HLA-B*35:03; TUBA3C; ENSG00000198033; TAA
HVGQAGVQI

SEQ ID NO: 94137 - protein, 9 aa, Homo sapiens
  Table A; Target 94137; HLA-B*38:01; TUBA3C; ENSG00000198033; TAA
HVGQAGVQI

SEQ ID NO: 94138 - protein, 9 aa, Homo sapiens
  Table A; Target 94138; HLA-B*39:01; TUBA3C; ENSG00000198033; TAA
HVGQAGVQI

SEQ ID NO: 94139 - protein, 9 aa, Homo sapiens
  Table A; Target 94139; HLA-B*40:02; TUBA3C; ENSG00000198033; TAA
HVGQAGVQI

SEQ ID NO: 94140 - protein, 9 aa, Homo sapiens
  Table A; Target 94140; HLA-B*51:01; TUBA3C; ENSG00000198033; TAA
HVGQAGVQI

SEQ ID NO: 94141 - protein, 9 aa, Homo sapiens
  Table A; Target 94141; HLA-C*03:03; TUBA3C; ENSG00000198033; TAA
HVGQAGVQI

SEQ ID NO: 94142 - protein, 9 aa, Homo sapiens
  Table A; Target 94142; HLA-C*04:01; TUBA3C; ENSG00000198033; TAA
HVGQAGVQI

SEQ ID NO: 94143 - protein, 9 aa, Homo sapiens
  Table A; Target 94143; HLA-C*05:01; TUBA3C; ENSG00000198033; TAA
HVGQAGVQI

SEQ ID NO: 94144 - protein, 9 aa, Homo sapiens
  Table A; Target 94144; HLA-C*06:02; TUBA3C; ENSG00000198033; TAA
HVGQAGVQI

SEQ ID NO: 94145 - protein, 9 aa, Homo sapiens
  Table A; Target 94145; HLA-C*07:01; TUBA3C; ENSG00000198033; TAA
HVGQAGVQI

SEQ ID NO: 94146 - protein, 9 aa, Homo sapiens
  Table A; Target 94146; HLA-C*07:02; TUBA3C; ENSG00000198033; TAA
HVGQAGVQI

SEQ ID NO: 94147 - protein, 9 aa, Homo sapiens
  Table A; Target 94147; HLA-C*07:04; TUBA3C; ENSG00000198033; TAA
HVGQAGVQI

SEQ ID NO: 94148 - protein, 9 aa, Homo sapiens
  Table A; Target 94148; HLA-C*07:06; TUBA3C; ENSG00000198033; TAA
HVGQAGVQI

SEQ ID NO: 94149 - protein, 10 aa, Homo sapiens
  Table A; Target 94149; HLA-C*07:01; TUBA3C; ENSG00000198033; TAA
HVGQAGVQIG

SEQ ID NO: 94150 - protein, 11 aa, Homo sapiens
  Table A; Target 94150; HLA-C*07:01; TUBA3C; ENSG00000198033; TAA
HVGQAGVQIGN

SEQ ID NO: 94151 - protein, 8 aa, Homo sapiens
  Table A; Target 94151; HLA-A*68:02; TUBA3C; ENSG00000198033; TAA
HVPRAVFV

SEQ ID NO: 94152 - protein, 8 aa, Homo sapiens
  Table A; Target 94152; HLA-B*51:01; TUBA3C; ENSG00000198033; TAA
HVPRAVFV

SEQ ID NO: 94153 - protein, 10 aa, Homo sapiens
  Table A; Target 94153; HLA-A*02:07; TUBA3C; ENSG00000198033; TAA
HVPRAVFVDL

SEQ ID NO: 94154 - protein, 10 aa, Homo sapiens
  Table A; Target 94154; HLA-A*68:02; TUBA3C; ENSG00000198033; TAA
HVPRAVFVDL

SEQ ID NO: 94155 - protein, 8 aa, Homo sapiens
  Table A; Target 94155; HLA-A*23:01; TUBA3C; ENSG00000198033; TAA
HYTIGKEI

SEQ ID NO: 94156 - protein, 8 aa, Homo sapiens
  Table A; Target 94156; HLA-A*24:02; TUBA3C; ENSG00000198033; TAA
HYTIGKEI

SEQ ID NO: 94157 - protein, 8 aa, Homo sapiens
  Table A; Target 94157; HLA-B*51:01; TUBA3C; ENSG00000198033; TAA
HYTIGKEI

SEQ ID NO: 94158 - protein, 8 aa, Homo sapiens
  Table A; Target 94158; HLA-C*04:01; TUBA3C; ENSG00000198033; TAA
HYTIGKEI

SEQ ID NO: 94159 - protein, 8 aa, Homo sapiens
  Table A; Target 94159; HLA-C*07:01; TUBA3C; ENSG00000198033; TAA
HYTIGKEI

SEQ ID NO: 94160 - protein, 8 aa, Homo sapiens
  Table A; Target 94160; HLA-C*14:02; TUBA3C; ENSG00000198033; TAA
HYTIGKEI

SEQ ID NO: 94161 - protein, 8 aa, Homo sapiens
  Table A; Target 94161; HLA-C*16:02; TUBA3C; ENSG00000198033; TAA
HYTIGKEI

SEQ ID NO: 94162 - protein, 8 aa, Homo sapiens
  Table A; Target 94162; HLA-B*08:01; TUBA3C; ENSG00000198033; TAA
IATIKTKR

SEQ ID NO: 94163 - protein, 8 aa, Homo sapiens
  Table A; Target 94163; HLA-C*16:01; TUBA3C; ENSG00000198033; TAA
IATIKTKR

SEQ ID NO: 94164 - protein, 8 aa, Homo sapiens
  Table A; Target 94164; HLA-C*07:01; TUBA3C; ENSG00000198033; TAA
IERPTYTN

SEQ ID NO: 94165 - protein, 9 aa, Homo sapiens
  Table A; Target 94165; HLA-A*02:03; TUBA3C; ENSG00000198033; TAA
IERPTYTNL

SEQ ID NO: 94166 - protein, 9 aa, Homo sapiens
  Table A; Target 94166; HLA-A*02:07; TUBA3C; ENSG00000198033; TAA
IERPTYTNL

SEQ ID NO: 94167 - protein, 9 aa, Homo sapiens
  Table A; Target 94167; HLA-A*03:01; TUBA3C; ENSG00000198033; TAA
IERPTYTNL

SEQ ID NO: 94168 - protein, 9 aa, Homo sapiens
  Table A; Target 94168; HLA-A*23:01; TUBA3C; ENSG00000198033; TAA
IERPTYTNL

SEQ ID NO: 94169 - protein, 9 aa, Homo sapiens
  Table A; Target 94169; HLA-A*24:02; TUBA3C; ENSG00000198033; TAA
IERPTYTNL

SEQ ID NO: 94170 - protein, 9 aa, Homo sapiens
  Table A; Target 94170; HLA-A*30:01; TUBA3C; ENSG00000198033; TAA
IERPTYTNL

SEQ ID NO: 94171 - protein, 9 aa, Homo sapiens
  Table A; Target 94171; HLA-A*31:01; TUBA3C; ENSG00000198033; TAA
IERPTYTNL

SEQ ID NO: 94172 - protein, 9 aa, Homo sapiens
  Table A; Target 94172; HLA-A*32:01; TUBA3C; ENSG00000198033; TAA
IERPTYTNL

SEQ ID NO: 94173 - protein, 9 aa, Homo sapiens
  Table A; Target 94173; HLA-B*07:02; TUBA3C; ENSG00000198033; TAA
IERPTYTNL

SEQ ID NO: 94174 - protein, 9 aa, Homo sapiens
  Table A; Target 94174; HLA-B*13:02; TUBA3C; ENSG00000198033; TAA
IERPTYTNL

SEQ ID NO: 94175 - protein, 9 aa, Homo sapiens
  Table A; Target 94175; HLA-B*15:01; TUBA3C; ENSG00000198033; TAA
IERPTYTNL

SEQ ID NO: 94176 - protein, 9 aa, Homo sapiens
  Table A; Target 94176; HLA-B*15:03; TUBA3C; ENSG00000198033; TAA
IERPTYTNL

SEQ ID NO: 94177 - protein, 9 aa, Homo sapiens
  Table A; Target 94177; HLA-B*18:01; TUBA3C; ENSG00000198033; TAA
IERPTYTNL

SEQ ID NO: 94178 - protein, 9 aa, Homo sapiens
  Table A; Target 94178; HLA-B*27:05; TUBA3C; ENSG00000198033; TAA
IERPTYTNL

SEQ ID NO: 94179 - protein, 9 aa, Homo sapiens
  Table A; Target 94179; HLA-B*37:01; TUBA3C; ENSG00000198033; TAA
IERPTYTNL

SEQ ID NO: 94180 - protein, 9 aa, Homo sapiens
  Table A; Target 94180; HLA-B*40:01; TUBA3C; ENSG00000198033; TAA
IERPTYTNL

SEQ ID NO: 94181 - protein, 9 aa, Homo sapiens
  Table A; Target 94181; HLA-B*40:02; TUBA3C; ENSG00000198033; TAA
IERPTYTNL

SEQ ID NO: 94182 - protein, 9 aa, Homo sapiens
  Table A; Target 94182; HLA-B*44:02; TUBA3C; ENSG00000198033; TAA
IERPTYTNL

SEQ ID NO: 94183 - protein, 9 aa, Homo sapiens
  Table A; Target 94183; HLA-B*44:03; TUBA3C; ENSG00000198033; TAA
IERPTYTNL

SEQ ID NO: 94184 - protein, 9 aa, Homo sapiens
  Table A; Target 94184; HLA-B*46:01; TUBA3C; ENSG00000198033; TAA
IERPTYTNL

SEQ ID NO: 94185 - protein, 9 aa, Homo sapiens
  Table A; Target 94185; HLA-B*49:01; TUBA3C; ENSG00000198033; TAA
IERPTYTNL

SEQ ID NO: 94186 - protein, 9 aa, Homo sapiens
  Table A; Target 94186; HLA-B*51:01; TUBA3C; ENSG00000198033; TAA
IERPTYTNL

SEQ ID NO: 94187 - protein, 9 aa, Homo sapiens
  Table A; Target 94187; HLA-B*57:01; TUBA3C; ENSG00000198033; TAA
IERPTYTNL

SEQ ID NO: 94188 - protein, 9 aa, Homo sapiens
  Table A; Target 94188; HLA-C*01:02; TUBA3C; ENSG00000198033; TAA
IERPTYTNL

SEQ ID NO: 94189 - protein, 9 aa, Homo sapiens
  Table A; Target 94189; HLA-C*02:02; TUBA3C; ENSG00000198033; TAA
IERPTYTNL

SEQ ID NO: 94190 - protein, 9 aa, Homo sapiens
  Table A; Target 94190; HLA-C*03:04; TUBA3C; ENSG00000198033; TAA
IERPTYTNL

SEQ ID NO: 94191 - protein, 9 aa, Homo sapiens
  Table A; Target 94191; HLA-C*04:01; TUBA3C; ENSG00000198033; TAA
IERPTYTNL

SEQ ID NO: 94192 - protein, 9 aa, Homo sapiens
  Table A; Target 94192; HLA-C*06:02; TUBA3C; ENSG00000198033; TAA
IERPTYTNL

SEQ ID NO: 94193 - protein, 9 aa, Homo sapiens
  Table A; Target 94193; HLA-C*07:01; TUBA3C; ENSG00000198033; TAA
IERPTYTNL

SEQ ID NO: 94194 - protein, 9 aa, Homo sapiens
  Table A; Target 94194; HLA-C*07:02; TUBA3C; ENSG00000198033; TAA
IERPTYTNL

SEQ ID NO: 94195 - protein, 9 aa, Homo sapiens
  Table A; Target 94195; HLA-C*07:04; TUBA3C; ENSG00000198033; TAA
IERPTYTNL

SEQ ID NO: 94196 - protein, 9 aa, Homo sapiens
  Table A; Target 94196; HLA-C*12:03; TUBA3C; ENSG00000198033; TAA
IERPTYTNL

SEQ ID NO: 94197 - protein, 9 aa, Homo sapiens
  Table A; Target 94197; HLA-C*14:02; TUBA3C; ENSG00000198033; TAA
IERPTYTNL

SEQ ID NO: 94198 - protein, 9 aa, Homo sapiens
  Table A; Target 94198; HLA-C*16:02; TUBA3C; ENSG00000198033; TAA
IERPTYTNL

SEQ ID NO: 94199 - protein, 9 aa, Homo sapiens
  Table A; Target 94199; HLA-C*16:04; TUBA3C; ENSG00000198033; TAA
IERPTYTNL

SEQ ID NO: 94200 - protein, 10 aa, Homo sapiens
  Table A; Target 94200; HLA-B*40:02; TUBA3C; ENSG00000198033; TAA
IERPTYTNLN

SEQ ID NO: 94201 - protein, 10 aa, Homo sapiens
  Table A; Target 94201; HLA-C*04:01; TUBA3C; ENSG00000198033; TAA
IERPTYTNLN

SEQ ID NO: 94202 - protein, 11 aa, Homo sapiens
  Table A; Target 94202; HLA-A*31:01; TUBA3C; ENSG00000198033; TAA
IERPTYTNLNR

SEQ ID NO: 94203 - protein, 8 aa, Homo sapiens
  Table A; Target 94203; HLA-B*39:01; TUBA3C; ENSG00000198033; TAA
IGGGDDSF

SEQ ID NO: 94204 - protein, 8 aa, Homo sapiens
  Table A; Target 94204; HLA-C*04:01; TUBA3C; ENSG00000198033; TAA
IGGGDDSF

SEQ ID NO: 94205 - protein, 8 aa, Homo sapiens
  Table A; Target 94205; HLA-C*07:01; TUBA3C; ENSG00000198033; TAA
IGGGDDSF

SEQ ID NO: 94206 - protein, 11 aa, Homo sapiens
  Table A; Target 94206; HLA-A*23:01; TUBA3C; ENSG00000198033; TAA
IGGGDDSFNTF

SEQ ID NO: 94207 - protein, 11 aa, Homo sapiens
  Table A; Target 94207; HLA-A*24:02; TUBA3C; ENSG00000198033; TAA
IGGGDDSFNTF

SEQ ID NO: 94208 - protein, 11 aa, Homo sapiens
  Table A; Target 94208; HLA-B*39:01; TUBA3C; ENSG00000198033; TAA
IGGGDDSFNTF

SEQ ID NO: 94209 - protein, 11 aa, Homo sapiens
  Table A; Target 94209; HLA-C*04:01; TUBA3C; ENSG00000198033; TAA
IGGGDDSFNTF

SEQ ID NO: 94210 - protein, 11 aa, Homo sapiens
  Table A; Target 94210; HLA-C*07:02; TUBA3C; ENSG00000198033; TAA
IGGGDDSFNTF

SEQ ID NO: 94211 - protein, 8 aa, Homo sapiens
  Table A; Target 94211; HLA-B*08:01; TUBA3C; ENSG00000198033; TAA
IGKEIVDL

SEQ ID NO: 94212 - protein, 8 aa, Homo sapiens
  Table A; Target 94212; HLA-B*15:01; TUBA3C; ENSG00000198033; TAA
IGKEIVDL

SEQ ID NO: 94213 - protein, 8 aa, Homo sapiens
  Table A; Target 94213; HLA-B*46:01; TUBA3C; ENSG00000198033; TAA
IGKEIVDL

SEQ ID NO: 94214 - protein, 8 aa, Homo sapiens
  Table A; Target 94214; HLA-C*07:04; TUBA3C; ENSG00000198033; TAA
IGKEIVDL

SEQ ID NO: 94215 - protein, 8 aa, Homo sapiens
  Table A; Target 94215; HLA-C*12:03; TUBA3C; ENSG00000198033; TAA
IGKEIVDL

SEQ ID NO: 94216 - protein, 9 aa, Homo sapiens
  Table A; Target 94216; HLA-B*51:01; TUBA3C; ENSG00000198033; TAA
IGKEIVDLV

SEQ ID NO: 94217 - protein, 9 aa, Homo sapiens
  Table A; Target 94217; HLA-C*12:03; TUBA3C; ENSG00000198033; TAA
IGKEIVDLV

SEQ ID NO: 94218 - protein, 9 aa, Homo sapiens
  Table A; Target 94218; HLA-C*07:01; TUBA3C; ENSG00000198033; TAA
IGNACWELY

SEQ ID NO: 94219 - protein, 8 aa, Homo sapiens
  Table A; Target 94219; HLA-B*08:01; TUBA3C; ENSG00000198033; TAA
IGQIVSSI

SEQ ID NO: 94220 - protein, 8 aa, Homo sapiens
  Table A; Target 94220; HLA-B*13:02; TUBA3C; ENSG00000198033; TAA
IGQIVSSI

SEQ ID NO: 94221 - protein, 8 aa, Homo sapiens
  Table A; Target 94221; HLA-B*15:01; TUBA3C; ENSG00000198033; TAA
IGQIVSSI

SEQ ID NO: 94222 - protein, 8 aa, Homo sapiens
  Table A; Target 94222; HLA-B*40:02; TUBA3C; ENSG00000198033; TAA
IGQIVSSI

SEQ ID NO: 94223 - protein, 8 aa, Homo sapiens
  Table A; Target 94223; HLA-B*51:01; TUBA3C; ENSG00000198033; TAA
IGQIVSSI

SEQ ID NO: 94224 - protein, 8 aa, Homo sapiens
  Table A; Target 94224; HLA-C*04:01; TUBA3C; ENSG00000198033; TAA
IGQIVSSI

SEQ ID NO: 94225 - protein, 8 aa, Homo sapiens
  Table A; Target 94225; HLA-C*05:01; TUBA3C; ENSG00000198033; TAA
IGQIVSSI

SEQ ID NO: 94226 - protein, 8 aa, Homo sapiens
  Table A; Target 94226; HLA-C*06:02; TUBA3C; ENSG00000198033; TAA
IGQIVSSI

SEQ ID NO: 94227 - protein, 8 aa, Homo sapiens
  Table A; Target 94227; HLA-C*07:01; TUBA3C; ENSG00000198033; TAA
IGQIVSSI

SEQ ID NO: 94228 - protein, 8 aa, Homo sapiens
  Table A; Target 94228; HLA-C*07:02; TUBA3C; ENSG00000198033; TAA
IGQIVSSI

SEQ ID NO: 94229 - protein, 8 aa, Homo sapiens
  Table A; Target 94229; HLA-C*07:04; TUBA3C; ENSG00000198033; TAA
IGQIVSSI

SEQ ID NO: 94230 - protein, 8 aa, Homo sapiens
  Table A; Target 94230; HLA-C*12:03; TUBA3C; ENSG00000198033; TAA
IGQIVSSI

SEQ ID NO: 94231 - protein, 8 aa, Homo sapiens
  Table A; Target 94231; HLA-C*14:02; TUBA3C; ENSG00000198033; TAA
IGQIVSSI

SEQ ID NO: 94232 - protein, 8 aa, Homo sapiens
  Table A; Target 94232; HLA-C*16:02; TUBA3C; ENSG00000198033; TAA
IGQIVSSI

SEQ ID NO: 94233 - protein, 9 aa, Homo sapiens
  Table A; Target 94233; HLA-C*04:01; TUBA3C; ENSG00000198033; TAA
IGQIVSSIT

SEQ ID NO: 94234 - protein, 9 aa, Homo sapiens
  Table A; Target 94234; HLA-C*06:02; TUBA3C; ENSG00000198033; TAA
IGQIVSSIT

SEQ ID NO: 94235 - protein, 9 aa, Homo sapiens
  Table A; Target 94235; HLA-C*07:01; TUBA3C; ENSG00000198033; TAA
IGQIVSSIT

SEQ ID NO: 94236 - protein, 10 aa, Homo sapiens
  Table A; Target 94236; HLA-C*04:01; TUBA3C; ENSG00000198033; TAA
IGQIVSSITA

SEQ ID NO: 94237 - protein, 10 aa, Homo sapiens
  Table A; Target 94237; HLA-C*06:02; TUBA3C; ENSG00000198033; TAA
IGQIVSSITA

SEQ ID NO: 94238 - protein, 10 aa, Homo sapiens
  Table A; Target 94238; HLA-C*07:01; TUBA3C; ENSG00000198033; TAA
IGQIVSSITA

SEQ ID NO: 94239 - protein, 10 aa, Homo sapiens
  Table A; Target 94239; HLA-C*07:02; TUBA3C; ENSG00000198033; TAA
IGQIVSSITA

SEQ ID NO: 94240 - protein, 8 aa, Homo sapiens
  Table A; Target 94240; HLA-A*32:01; TUBA3C; ENSG00000198033; TAA
IHFPLATY

SEQ ID NO: 94241 - protein, 8 aa, Homo sapiens
  Table A; Target 94241; HLA-B*15:03; TUBA3C; ENSG00000198033; TAA
IHFPLATY

SEQ ID NO: 94242 - protein, 8 aa, Homo sapiens
  Table A; Target 94242; HLA-B*57:01; TUBA3C; ENSG00000198033; TAA
IHFPLATY

SEQ ID NO: 94243 - protein, 8 aa, Homo sapiens
  Table A; Target 94243; HLA-C*07:01; TUBA3C; ENSG00000198033; TAA
IHFPLATY

SEQ ID NO: 94244 - protein, 8 aa, Homo sapiens
  Table A; Target 94244; HLA-B*39:01; TUBA3C; ENSG00000198033; TAA
IHVGQAGV

SEQ ID NO: 94245 - protein, 9 aa, Homo sapiens
  Table A; Target 94245; HLA-B*39:01; TUBA3C; ENSG00000198033; TAA
IHVGQAGVQ

SEQ ID NO: 94246 - protein, 9 aa, Homo sapiens
  Table A; Target 94246; HLA-C*06:02; TUBA3C; ENSG00000198033; TAA
IHVGQAGVQ

SEQ ID NO: 94247 - protein, 9 aa, Homo sapiens
  Table A; Target 94247; HLA-C*07:01; TUBA3C; ENSG00000198033; TAA
IHVGQAGVQ

SEQ ID NO: 94248 - protein, 10 aa, Homo sapiens
  Table A; Target 94248; HLA-B*13:02; TUBA3C; ENSG00000198033; TAA
IHVGQAGVQI

SEQ ID NO: 94249 - protein, 10 aa, Homo sapiens
  Table A; Target 94249; HLA-B*27:05; TUBA3C; ENSG00000198033; TAA
IHVGQAGVQI

SEQ ID NO: 94250 - protein, 10 aa, Homo sapiens
  Table A; Target 94250; HLA-B*38:01; TUBA3C; ENSG00000198033; TAA
IHVGQAGVQI

SEQ ID NO: 94251 - protein, 10 aa, Homo sapiens
  Table A; Target 94251; HLA-B*39:01; TUBA3C; ENSG00000198033; TAA
IHVGQAGVQI

SEQ ID NO: 94252 - protein, 10 aa, Homo sapiens
  Table A; Target 94252; HLA-C*04:01; TUBA3C; ENSG00000198033; TAA
IHVGQAGVQI

SEQ ID NO: 94253 - protein, 10 aa, Homo sapiens
  Table A; Target 94253; HLA-C*06:02; TUBA3C; ENSG00000198033; TAA
IHVGQAGVQI

SEQ ID NO: 94254 - protein, 10 aa, Homo sapiens
  Table A; Target 94254; HLA-C*07:01; TUBA3C; ENSG00000198033; TAA
IHVGQAGVQI

SEQ ID NO: 94255 - protein, 10 aa, Homo sapiens
  Table A; Target 94255; HLA-C*07:04; TUBA3C; ENSG00000198033; TAA
IHVGQAGVQI

SEQ ID NO: 94256 - protein, 11 aa, Homo sapiens
  Table A; Target 94256; HLA-C*07:01; TUBA3C; ENSG00000198033; TAA
IHVGQAGVQIG

SEQ ID NO: 94257 - protein, 9 aa, Homo sapiens
  Table A; Target 94257; HLA-B*15:03; TUBA3C; ENSG00000198033; TAA
IKTKRTIQF

SEQ ID NO: 94258 - protein, 8 aa, Homo sapiens
  Table A; Target 94258; HLA-A*02:01; TUBA3C; ENSG00000198033; TAA
ILTTHTTL

SEQ ID NO: 94259 - protein, 8 aa, Homo sapiens
  Table A; Target 94259; HLA-A*02:03; TUBA3C; ENSG00000198033; TAA
ILTTHTTL

SEQ ID NO: 94260 - protein, 8 aa, Homo sapiens
  Table A; Target 94260; HLA-A*23:01; TUBA3C; ENSG00000198033; TAA
ILTTHTTL

SEQ ID NO: 94261 - protein, 8 aa, Homo sapiens
  Table A; Target 94261; HLA-A*24:02; TUBA3C; ENSG00000198033; TAA
ILTTHTTL

SEQ ID NO: 94262 - protein, 8 aa, Homo sapiens
  Table A; Target 94262; HLA-A*32:01; TUBA3C; ENSG00000198033; TAA
ILTTHTTL

SEQ ID NO: 94263 - protein, 8 aa, Homo sapiens
  Table A; Target 94263; HLA-B*07:02; TUBA3C; ENSG00000198033; TAA
ILTTHTTL

SEQ ID NO: 94264 - protein, 8 aa, Homo sapiens
  Table A; Target 94264; HLA-B*08:01; TUBA3C; ENSG00000198033; TAA
ILTTHTTL

SEQ ID NO: 94265 - protein, 8 aa, Homo sapiens
  Table A; Target 94265; HLA-B*15:01; TUBA3C; ENSG00000198033; TAA
ILTTHTTL

SEQ ID NO: 94266 - protein, 8 aa, Homo sapiens
  Table A; Target 94266; HLA-B*15:03; TUBA3C; ENSG00000198033; TAA
ILTTHTTL

SEQ ID NO: 94267 - protein, 8 aa, Homo sapiens
  Table A; Target 94267; HLA-B*37:01; TUBA3C; ENSG00000198033; TAA
ILTTHTTL

SEQ ID NO: 94268 - protein, 8 aa, Homo sapiens
  Table A; Target 94268; HLA-B*39:01; TUBA3C; ENSG00000198033; TAA
ILTTHTTL

SEQ ID NO: 94269 - protein, 8 aa, Homo sapiens
  Table A; Target 94269; HLA-B*40:02; TUBA3C; ENSG00000198033; TAA
ILTTHTTL

SEQ ID NO: 94270 - protein, 8 aa, Homo sapiens
  Table A; Target 94270; HLA-B*46:01; TUBA3C; ENSG00000198033; TAA
ILTTHTTL

SEQ ID NO: 94271 - protein, 8 aa, Homo sapiens
  Table A; Target 94271; HLA-B*55:01; TUBA3C; ENSG00000198033; TAA
ILTTHTTL

SEQ ID NO: 94272 - protein, 8 aa, Homo sapiens
  Table A; Target 94272; HLA-B*58:01; TUBA3C; ENSG00000198033; TAA
ILTTHTTL

SEQ ID NO: 94273 - protein, 8 aa, Homo sapiens
  Table A; Target 94273; HLA-C*01:02; TUBA3C; ENSG00000198033; TAA
ILTTHTTL

SEQ ID NO: 94274 - protein, 8 aa, Homo sapiens
  Table A; Target 94274; HLA-C*03:03; TUBA3C; ENSG00000198033; TAA
ILTTHTTL

SEQ ID NO: 94275 - protein, 8 aa, Homo sapiens
  Table A; Target 94275; HLA-C*03:04; TUBA3C; ENSG00000198033; TAA
ILTTHTTL

SEQ ID NO: 94276 - protein, 8 aa, Homo sapiens
  Table A; Target 94276; HLA-C*04:01; TUBA3C; ENSG00000198033; TAA
ILTTHTTL

SEQ ID NO: 94277 - protein, 8 aa, Homo sapiens
  Table A; Target 94277; HLA-C*05:01; TUBA3C; ENSG00000198033; TAA
ILTTHTTL

SEQ ID NO: 94278 - protein, 8 aa, Homo sapiens
  Table A; Target 94278; HLA-C*06:02; TUBA3C; ENSG00000198033; TAA
ILTTHTTL

SEQ ID NO: 94279 - protein, 8 aa, Homo sapiens
  Table A; Target 94279; HLA-C*07:01; TUBA3C; ENSG00000198033; TAA
ILTTHTTL

SEQ ID NO: 94280 - protein, 8 aa, Homo sapiens
  Table A; Target 94280; HLA-C*07:02; TUBA3C; ENSG00000198033; TAA
ILTTHTTL

SEQ ID NO: 94281 - protein, 8 aa, Homo sapiens
  Table A; Target 94281; HLA-C*07:04; TUBA3C; ENSG00000198033; TAA
ILTTHTTL

SEQ ID NO: 94282 - protein, 8 aa, Homo sapiens
  Table A; Target 94282; HLA-C*12:03; TUBA3C; ENSG00000198033; TAA
ILTTHTTL

SEQ ID NO: 94283 - protein, 8 aa, Homo sapiens
  Table A; Target 94283; HLA-C*14:02; TUBA3C; ENSG00000198033; TAA
ILTTHTTL

SEQ ID NO: 94284 - protein, 8 aa, Homo sapiens
  Table A; Target 94284; HLA-C*16:01; TUBA3C; ENSG00000198033; TAA
ILTTHTTL

SEQ ID NO: 94285 - protein, 8 aa, Homo sapiens
  Table A; Target 94285; HLA-C*16:02; TUBA3C; ENSG00000198033; TAA
ILTTHTTL

SEQ ID NO: 94286 - protein, 10 aa, Homo sapiens
  Table A; Target 94286; HLA-A*03:01; TUBA3C; ENSG00000198033; TAA
ILTTHTTLEH

SEQ ID NO: 94287 - protein, 10 aa, Homo sapiens
  Table A; Target 94287; HLA-C*07:01; TUBA3C; ENSG00000198033; TAA
ILTTHTTLEH

SEQ ID NO: 94288 - protein, 8 aa, Homo sapiens
  Table A; Target 94288; HLA-B*13:02; TUBA3C; ENSG00000198033; TAA
INYQPPTV

SEQ ID NO: 94289 - protein, 8 aa, Homo sapiens
  Table A; Target 94289; HLA-B*49:01; TUBA3C; ENSG00000198033; TAA
INYQPPTV

SEQ ID NO: 94290 - protein, 8 aa, Homo sapiens
  Table A; Target 94290; HLA-B*51:01; TUBA3C; ENSG00000198033; TAA
INYQPPTV

SEQ ID NO: 94291 - protein, 8 aa, Homo sapiens
  Table A; Target 94291; HLA-B*54:01; TUBA3C; ENSG00000198033; TAA
INYQPPTV

SEQ ID NO: 94292 - protein, 8 aa, Homo sapiens
  Table A; Target 94292; HLA-C*06:02; TUBA3C; ENSG00000198033; TAA
INYQPPTV

SEQ ID NO: 94293 - protein, 8 aa, Homo sapiens
  Table A; Target 94293; HLA-C*12:03; TUBA3C; ENSG00000198033; TAA
INYQPPTV

SEQ ID NO: 94294 - protein, 8 aa, Homo sapiens
  Table A; Target 94294; HLA-C*16:02; TUBA3C; ENSG00000198033; TAA
INYQPPTV

SEQ ID NO: 94295 - protein, 8 aa, Homo sapiens
  Table A; Target 94295; HLA-C*16:04; TUBA3C; ENSG00000198033; TAA
INYQPPTV

SEQ ID NO: 94296 - protein, 9 aa, Homo sapiens
  Table A; Target 94296; HLA-A*02:01; TUBA3C; ENSG00000198033; TAA
INYQPPTVV

SEQ ID NO: 94297 - protein, 9 aa, Homo sapiens
  Table A; Target 94297; HLA-A*02:03; TUBA3C; ENSG00000198033; TAA
INYQPPTVV

SEQ ID NO: 94298 - protein, 9 aa, Homo sapiens
  Table A; Target 94298; HLA-A*23:01; TUBA3C; ENSG00000198033; TAA
INYQPPTVV

SEQ ID NO: 94299 - protein, 9 aa, Homo sapiens
  Table A; Target 94299; HLA-A*30:01; TUBA3C; ENSG00000198033; TAA
INYQPPTVV

SEQ ID NO: 94300 - protein, 9 aa, Homo sapiens
  Table A; Target 94300; HLA-A*68:02; TUBA3C; ENSG00000198033; TAA
INYQPPTVV

SEQ ID NO: 94301 - protein, 9 aa, Homo sapiens
  Table A; Target 94301; HLA-B*13:02; TUBA3C; ENSG00000198033; TAA
INYQPPTVV

SEQ ID NO: 94302 - protein, 9 aa, Homo sapiens
  Table A; Target 94302; HLA-B*46:01; TUBA3C; ENSG00000198033; TAA
INYQPPTVV

SEQ ID NO: 94303 - protein, 9 aa, Homo sapiens
  Table A; Target 94303; HLA-B*49:01; TUBA3C; ENSG00000198033; TAA
INYQPPTVV

SEQ ID NO: 94304 - protein, 9 aa, Homo sapiens
  Table A; Target 94304; HLA-B*51:01; TUBA3C; ENSG00000198033; TAA
INYQPPTVV

SEQ ID NO: 94305 - protein, 9 aa, Homo sapiens
  Table A; Target 94305; HLA-B*54:01; TUBA3C; ENSG00000198033; TAA
INYQPPTVV

SEQ ID NO: 94306 - protein, 9 aa, Homo sapiens
  Table A; Target 94306; HLA-B*55:01; TUBA3C; ENSG00000198033; TAA
INYQPPTVV

SEQ ID NO: 94307 - protein, 9 aa, Homo sapiens
  Table A; Target 94307; HLA-B*56:01; TUBA3C; ENSG00000198033; TAA
INYQPPTVV

SEQ ID NO: 94308 - protein, 9 aa, Homo sapiens
  Table A; Target 94308; HLA-C*02:02; TUBA3C; ENSG00000198033; TAA
INYQPPTVV

SEQ ID NO: 94309 - protein, 9 aa, Homo sapiens
  Table A; Target 94309; HLA-C*05:01; TUBA3C; ENSG00000198033; TAA
INYQPPTVV

SEQ ID NO: 94310 - protein, 9 aa, Homo sapiens
  Table A; Target 94310; HLA-C*06:02; TUBA3C; ENSG00000198033; TAA
INYQPPTVV

SEQ ID NO: 94311 - protein, 9 aa, Homo sapiens
  Table A; Target 94311; HLA-C*12:03; TUBA3C; ENSG00000198033; TAA
INYQPPTVV

SEQ ID NO: 94312 - protein, 9 aa, Homo sapiens
  Table A; Target 94312; HLA-C*16:04; TUBA3C; ENSG00000198033; TAA
INYQPPTVV

SEQ ID NO: 94313 - protein, 11 aa, Homo sapiens
  Table A; Target 94313; HLA-C*04:01; TUBA3C; ENSG00000198033; TAA
INYQPPTVVPG

SEQ ID NO: 94314 - protein, 8 aa, Homo sapiens
  Table A; Target 94314; HLA-C*04:01; TUBA3C; ENSG00000198033; TAA
IQPDGQMP

SEQ ID NO: 94315 - protein, 9 aa, Homo sapiens
  Table A; Target 94315; HLA-C*07:04; TUBA3C; ENSG00000198033; TAA
IQPDGQMPS

SEQ ID NO: 94316 - protein, 11 aa, Homo sapiens
  Table A; Target 94316; HLA-A*11:01; TUBA3C; ENSG00000198033; TAA
IQPDGQMPSDK

SEQ ID NO: 94317 - protein, 11 aa, Homo sapiens
  Table A; Target 94317; HLA-B*27:02; TUBA3C; ENSG00000198033; TAA
IQPDGQMPSDK

SEQ ID NO: 94318 - protein, 11 aa, Homo sapiens
  Table A; Target 94318; HLA-B*39:01; TUBA3C; ENSG00000198033; TAA
IQPDGQMPSDK

SEQ ID NO: 94319 - protein, 11 aa, Homo sapiens
  Table A; Target 94319; HLA-C*04:01; TUBA3C; ENSG00000198033; TAA
IQPDGQMPSDK

SEQ ID NO: 94320 - protein, 11 aa, Homo sapiens
  Table A; Target 94320; HLA-C*06:02; TUBA3C; ENSG00000198033; TAA
IQPDGQMPSDK

SEQ ID NO: 94321 - protein, 11 aa, Homo sapiens
  Table A; Target 94321; HLA-C*07:01; TUBA3C; ENSG00000198033; TAA
IQPDGQMPSDK

SEQ ID NO: 94322 - protein, 11 aa, Homo sapiens
  Table A; Target 94322; HLA-C*07:02; TUBA3C; ENSG00000198033; TAA
IQPDGQMPSDK

SEQ ID NO: 94323 - protein, 8 aa, Homo sapiens
  Table A; Target 94323; HLA-C*06:02; TUBA3C; ENSG00000198033; TAA
ISIHVGQA

SEQ ID NO: 94324 - protein, 8 aa, Homo sapiens
  Table A; Target 94324; HLA-C*12:03; TUBA3C; ENSG00000198033; TAA
ISIHVGQA

SEQ ID NO: 94325 - protein, 9 aa, Homo sapiens
  Table A; Target 94325; HLA-B*46:01; TUBA3C; ENSG00000198033; TAA
ISIHVGQAG

SEQ ID NO: 94326 - protein, 9 aa, Homo sapiens
  Table A; Target 94326; HLA-B*57:01; TUBA3C; ENSG00000198033; TAA
ISIHVGQAG

SEQ ID NO: 94327 - protein, 9 aa, Homo sapiens
  Table A; Target 94327; HLA-B*58:01; TUBA3C; ENSG00000198033; TAA
ISIHVGQAG

SEQ ID NO: 94328 - protein, 9 aa, Homo sapiens
  Table A; Target 94328; HLA-C*03:03; TUBA3C; ENSG00000198033; TAA
ISIHVGQAG

SEQ ID NO: 94329 - protein, 9 aa, Homo sapiens
  Table A; Target 94329; HLA-C*03:04; TUBA3C; ENSG00000198033; TAA
ISIHVGQAG

SEQ ID NO: 94330 - protein, 10 aa, Homo sapiens
  Table A; Target 94330; HLA-A*02:03; TUBA3C; ENSG00000198033; TAA
ISIHVGQAGV

SEQ ID NO: 94331 - protein, 10 aa, Homo sapiens
  Table A; Target 94331; HLA-A*68:02; TUBA3C; ENSG00000198033; TAA
ISIHVGQAGV

SEQ ID NO: 94332 - protein, 10 aa, Homo sapiens
  Table A; Target 94332; HLA-B*58:01; TUBA3C; ENSG00000198033; TAA
ISIHVGQAGV

SEQ ID NO: 94333 - protein, 10 aa, Homo sapiens
  Table A; Target 94333; HLA-C*06:02; TUBA3C; ENSG00000198033; TAA
ISIHVGQAGV

SEQ ID NO: 94334 - protein, 10 aa, Homo sapiens
  Table A; Target 94334; HLA-C*07:02; TUBA3C; ENSG00000198033; TAA
ISIHVGQAGV

SEQ ID NO: 94335 - protein, 10 aa, Homo sapiens
  Table A; Target 94335; HLA-C*16:02; TUBA3C; ENSG00000198033; TAA
ISIHVGQAGV

SEQ ID NO: 94336 - protein, 11 aa, Homo sapiens
  Table A; Target 94336; HLA-C*07:01; TUBA3C; ENSG00000198033; TAA
ISIHVGQAGVQ

SEQ ID NO: 94337 - protein, 10 aa, Homo sapiens
  Table A; Target 94337; HLA-A*68:02; TUBA3C; ENSG00000198033; TAA
ITASLRFDGA

SEQ ID NO: 94338 - protein, 11 aa, Homo sapiens
  Table A; Target 94338; HLA-A*68:02; TUBA3C; ENSG00000198033; TAA
ITASLRFDGAL

SEQ ID NO: 94339 - protein, 11 aa, Homo sapiens
  Table A; Target 94339; HLA-B*07:02; TUBA3C; ENSG00000198033; TAA
ITASLRFDGAL

SEQ ID NO: 94340 - protein, 11 aa, Homo sapiens
  Table A; Target 94340; HLA-C*06:02; TUBA3C; ENSG00000198033; TAA
ITASLRFDGAL

SEQ ID NO: 94341 - protein, 11 aa, Homo sapiens
  Table A; Target 94341; HLA-C*07:01; TUBA3C; ENSG00000198033; TAA
ITASLRFDGAL

SEQ ID NO: 94342 - protein, 11 aa, Homo sapiens
  Table A; Target 94342; HLA-C*07:02; TUBA3C; ENSG00000198033; TAA
ITASLRFDGAL

SEQ ID NO: 94343 - protein, 11 aa, Homo sapiens
  Table A; Target 94343; HLA-A*01:01; TUBA3C; ENSG00000198033; TAA
ITGKEDAANNY

SEQ ID NO: 94344 - protein, 11 aa, Homo sapiens
  Table A; Target 94344; HLA-A*03:02; TUBA3C; ENSG00000198033; TAA
ITGKEDAANNY

SEQ ID NO: 94345 - protein, 11 aa, Homo sapiens
  Table A; Target 94345; HLA-A*26:01; TUBA3C; ENSG00000198033; TAA
ITGKEDAANNY

SEQ ID NO: 94346 - protein, 11 aa, Homo sapiens
  Table A; Target 94346; HLA-A*29:02; TUBA3C; ENSG00000198033; TAA
ITGKEDAANNY

SEQ ID NO: 94347 - protein, 11 aa, Homo sapiens
  Table A; Target 94347; HLA-A*30:02; TUBA3C; ENSG00000198033; TAA
ITGKEDAANNY

SEQ ID NO: 94348 - protein, 11 aa, Homo sapiens
  Table A; Target 94348; HLA-A*32:01; TUBA3C; ENSG00000198033; TAA
ITGKEDAANNY

SEQ ID NO: 94349 - protein, 11 aa, Homo sapiens
  Table A; Target 94349; HLA-A*68:01; TUBA3C; ENSG00000198033; TAA
ITGKEDAANNY

SEQ ID NO: 94350 - protein, 11 aa, Homo sapiens
  Table A; Target 94350; HLA-B*15:01; TUBA3C; ENSG00000198033; TAA
ITGKEDAANNY

SEQ ID NO: 94351 - protein, 11 aa, Homo sapiens
  Table A; Target 94351; HLA-B*57:01; TUBA3C; ENSG00000198033; TAA
ITGKEDAANNY

SEQ ID NO: 94352 - protein, 11 aa, Homo sapiens
  Table A; Target 94352; HLA-B*58:01; TUBA3C; ENSG00000198033; TAA
ITGKEDAANNY

SEQ ID NO: 94353 - protein, 11 aa, Homo sapiens
  Table A; Target 94353; HLA-C*04:01; TUBA3C; ENSG00000198033; TAA
ITGKEDAANNY

SEQ ID NO: 94354 - protein, 11 aa, Homo sapiens
  Table A; Target 94354; HLA-C*07:01; TUBA3C; ENSG00000198033; TAA
ITGKEDAANNY

SEQ ID NO: 94355 - protein, 11 aa, Homo sapiens
  Table A; Target 94355; HLA-C*07:04; TUBA3C; ENSG00000198033; TAA
ITGKEDAANNY

SEQ ID NO: 94356 - protein, 11 aa, Homo sapiens
  Table A; Target 94356; HLA-C*16:02; TUBA3C; ENSG00000198033; TAA
ITGKEDAANNY

SEQ ID NO: 94357 - protein, 9 aa, Homo sapiens
  Table A; Target 94357; HLA-B*54:01; TUBA3C; ENSG00000198033; TAA
ITNACFEPA

SEQ ID NO: 94358 - protein, 9 aa, Homo sapiens
  Table A; Target 94358; HLA-C*06:02; TUBA3C; ENSG00000198033; TAA
ITNACFEPA

SEQ ID NO: 94359 - protein, 8 aa, Homo sapiens
  Table A; Target 94359; HLA-A*01:01; TUBA3C; ENSG00000198033; TAA
IVDLVLDR

SEQ ID NO: 94360 - protein, 8 aa, Homo sapiens
  Table A; Target 94360; HLA-B*27:02; TUBA3C; ENSG00000198033; TAA
IVDLVLDR

SEQ ID NO: 94361 - protein, 9 aa, Homo sapiens
  Table A; Target 94361; HLA-A*01:01; TUBA3C; ENSG00000198033; TAA
IVDLVLDRI

SEQ ID NO: 94362 - protein, 9 aa, Homo sapiens
  Table A; Target 94362; HLA-A*02:01; TUBA3C; ENSG00000198033; TAA
IVDLVLDRI

SEQ ID NO: 94363 - protein, 9 aa, Homo sapiens
  Table A; Target 94363; HLA-A*02:07; TUBA3C; ENSG00000198033; TAA
IVDLVLDRI

SEQ ID NO: 94364 - protein, 9 aa, Homo sapiens
  Table A; Target 94364; HLA-A*68:02; TUBA3C; ENSG00000198033; TAA
IVDLVLDRI

SEQ ID NO: 94365 - protein, 9 aa, Homo sapiens
  Table A; Target 94365; HLA-B*38:01; TUBA3C; ENSG00000198033; TAA
IVDLVLDRI

SEQ ID NO: 94366 - protein, 9 aa, Homo sapiens
  Table A; Target 94366; HLA-B*51:01; TUBA3C; ENSG00000198033; TAA
IVDLVLDRI

SEQ ID NO: 94367 - protein, 9 aa, Homo sapiens
  Table A; Target 94367; HLA-B*55:01; TUBA3C; ENSG00000198033; TAA
IVDLVLDRI

SEQ ID NO: 94368 - protein, 9 aa, Homo sapiens
  Table A; Target 94368; HLA-C*04:01; TUBA3C; ENSG00000198033; TAA
IVDLVLDRI

SEQ ID NO: 94369 - protein, 9 aa, Homo sapiens
  Table A; Target 94369; HLA-C*05:01; TUBA3C; ENSG00000198033; TAA
IVDLVLDRI

SEQ ID NO: 94370 - protein, 9 aa, Homo sapiens
  Table A; Target 94370; HLA-A*02:01; TUBA3C; ENSG00000198033; TAA
IVSSITASL

SEQ ID NO: 94371 - protein, 9 aa, Homo sapiens
  Table A; Target 94371; HLA-A*02:03; TUBA3C; ENSG00000198033; TAA
IVSSITASL

SEQ ID NO: 94372 - protein, 9 aa, Homo sapiens
  Table A; Target 94372; HLA-A*02:04; TUBA3C; ENSG00000198033; TAA
IVSSITASL

SEQ ID NO: 94373 - protein, 9 aa, Homo sapiens
  Table A; Target 94373; HLA-A*02:07; TUBA3C; ENSG00000198033; TAA
IVSSITASL

SEQ ID NO: 94374 - protein, 9 aa, Homo sapiens
  Table A; Target 94374; HLA-A*03:01; TUBA3C; ENSG00000198033; TAA
IVSSITASL

SEQ ID NO: 94375 - protein, 9 aa, Homo sapiens
  Table A; Target 94375; HLA-A*03:02; TUBA3C; ENSG00000198033; TAA
IVSSITASL

SEQ ID NO: 94376 - protein, 9 aa, Homo sapiens
  Table A; Target 94376; HLA-A*11:01; TUBA3C; ENSG00000198033; TAA
IVSSITASL

SEQ ID NO: 94377 - protein, 9 aa, Homo sapiens
  Table A; Target 94377; HLA-A*23:01; TUBA3C; ENSG00000198033; TAA
IVSSITASL

SEQ ID NO: 94378 - protein, 9 aa, Homo sapiens
  Table A; Target 94378; HLA-A*24:02; TUBA3C; ENSG00000198033; TAA
IVSSITASL

SEQ ID NO: 94379 - protein, 9 aa, Homo sapiens
  Table A; Target 94379; HLA-A*25:01; TUBA3C; ENSG00000198033; TAA
IVSSITASL

SEQ ID NO: 94380 - protein, 9 aa, Homo sapiens
  Table A; Target 94380; HLA-A*26:01; TUBA3C; ENSG00000198033; TAA
IVSSITASL

SEQ ID NO: 94381 - protein, 9 aa, Homo sapiens
  Table A; Target 94381; HLA-A*29:02; TUBA3C; ENSG00000198033; TAA
IVSSITASL

SEQ ID NO: 94382 - protein, 9 aa, Homo sapiens
  Table A; Target 94382; HLA-A*30:01; TUBA3C; ENSG00000198033; TAA
IVSSITASL

SEQ ID NO: 94383 - protein, 9 aa, Homo sapiens
  Table A; Target 94383; HLA-A*30:02; TUBA3C; ENSG00000198033; TAA
IVSSITASL

SEQ ID NO: 94384 - protein, 9 aa, Homo sapiens
  Table A; Target 94384; HLA-A*31:01; TUBA3C; ENSG00000198033; TAA
IVSSITASL

SEQ ID NO: 94385 - protein, 9 aa, Homo sapiens
  Table A; Target 94385; HLA-A*32:01; TUBA3C; ENSG00000198033; TAA
IVSSITASL

SEQ ID NO: 94386 - protein, 9 aa, Homo sapiens
  Table A; Target 94386; HLA-A*33:01; TUBA3C; ENSG00000198033; TAA
IVSSITASL

SEQ ID NO: 94387 - protein, 9 aa, Homo sapiens
  Table A; Target 94387; HLA-A*33:03; TUBA3C; ENSG00000198033; TAA
IVSSITASL

SEQ ID NO: 94388 - protein, 9 aa, Homo sapiens
  Table A; Target 94388; HLA-A*68:01; TUBA3C; ENSG00000198033; TAA
IVSSITASL

SEQ ID NO: 94389 - protein, 9 aa, Homo sapiens
  Table A; Target 94389; HLA-A*68:02; TUBA3C; ENSG00000198033; TAA
IVSSITASL

SEQ ID NO: 94390 - protein, 9 aa, Homo sapiens
  Table A; Target 94390; HLA-B*07:02; TUBA3C; ENSG00000198033; TAA
IVSSITASL

SEQ ID NO: 94391 - protein, 9 aa, Homo sapiens
  Table A; Target 94391; HLA-B*08:01; TUBA3C; ENSG00000198033; TAA
IVSSITASL

SEQ ID NO: 94392 - protein, 9 aa, Homo sapiens
  Table A; Target 94392; HLA-B*13:02; TUBA3C; ENSG00000198033; TAA
IVSSITASL

SEQ ID NO: 94393 - protein, 9 aa, Homo sapiens
  Table A; Target 94393; HLA-B*15:01; TUBA3C; ENSG00000198033; TAA
IVSSITASL

SEQ ID NO: 94394 - protein, 9 aa, Homo sapiens
  Table A; Target 94394; HLA-B*15:03; TUBA3C; ENSG00000198033; TAA
IVSSITASL

SEQ ID NO: 94395 - protein, 9 aa, Homo sapiens
  Table A; Target 94395; HLA-B*18:01; TUBA3C; ENSG00000198033; TAA
IVSSITASL

SEQ ID NO: 94396 - protein, 9 aa, Homo sapiens
  Table A; Target 94396; HLA-B*27:05; TUBA3C; ENSG00000198033; TAA
IVSSITASL

SEQ ID NO: 94397 - protein, 9 aa, Homo sapiens
  Table A; Target 94397; HLA-B*35:01; TUBA3C; ENSG00000198033; TAA
IVSSITASL

SEQ ID NO: 94398 - protein, 9 aa, Homo sapiens
  Table A; Target 94398; HLA-B*35:03; TUBA3C; ENSG00000198033; TAA
IVSSITASL

SEQ ID NO: 94399 - protein, 9 aa, Homo sapiens
  Table A; Target 94399; HLA-B*37:01; TUBA3C; ENSG00000198033; TAA
IVSSITASL

SEQ ID NO: 94400 - protein, 9 aa, Homo sapiens
  Table A; Target 94400; HLA-B*38:01; TUBA3C; ENSG00000198033; TAA
IVSSITASL

SEQ ID NO: 94401 - protein, 9 aa, Homo sapiens
  Table A; Target 94401; HLA-B*39:01; TUBA3C; ENSG00000198033; TAA
IVSSITASL

SEQ ID NO: 94402 - protein, 9 aa, Homo sapiens
  Table A; Target 94402; HLA-B*40:01; TUBA3C; ENSG00000198033; TAA
IVSSITASL

SEQ ID NO: 94403 - protein, 9 aa, Homo sapiens
  Table A; Target 94403; HLA-B*40:02; TUBA3C; ENSG00000198033; TAA
IVSSITASL

SEQ ID NO: 94404 - protein, 9 aa, Homo sapiens
  Table A; Target 94404; HLA-B*44:03; TUBA3C; ENSG00000198033; TAA
IVSSITASL

SEQ ID NO: 94405 - protein, 9 aa, Homo sapiens
  Table A; Target 94405; HLA-B*46:01; TUBA3C; ENSG00000198033; TAA
IVSSITASL

SEQ ID NO: 94406 - protein, 9 aa, Homo sapiens
  Table A; Target 94406; HLA-B*51:01; TUBA3C; ENSG00000198033; TAA
IVSSITASL

SEQ ID NO: 94407 - protein, 9 aa, Homo sapiens
  Table A; Target 94407; HLA-B*54:01; TUBA3C; ENSG00000198033; TAA
IVSSITASL

SEQ ID NO: 94408 - protein, 9 aa, Homo sapiens
  Table A; Target 94408; HLA-B*55:01; TUBA3C; ENSG00000198033; TAA
IVSSITASL

SEQ ID NO: 94409 - protein, 9 aa, Homo sapiens
  Table A; Target 94409; HLA-B*56:01; TUBA3C; ENSG00000198033; TAA
IVSSITASL

SEQ ID NO: 94410 - protein, 9 aa, Homo sapiens
  Table A; Target 94410; HLA-B*57:01; TUBA3C; ENSG00000198033; TAA
IVSSITASL

SEQ ID NO: 94411 - protein, 9 aa, Homo sapiens
  Table A; Target 94411; HLA-B*58:01; TUBA3C; ENSG00000198033; TAA
IVSSITASL

SEQ ID NO: 94412 - protein, 9 aa, Homo sapiens
  Table A; Target 94412; HLA-C*01:02; TUBA3C; ENSG00000198033; TAA
IVSSITASL

SEQ ID NO: 94413 - protein, 9 aa, Homo sapiens
  Table A; Target 94413; HLA-C*02:02; TUBA3C; ENSG00000198033; TAA
IVSSITASL

SEQ ID NO: 94414 - protein, 9 aa, Homo sapiens
  Table A; Target 94414; HLA-C*03:03; TUBA3C; ENSG00000198033; TAA
IVSSITASL

SEQ ID NO: 94415 - protein, 9 aa, Homo sapiens
  Table A; Target 94415; HLA-C*03:04; TUBA3C; ENSG00000198033; TAA
IVSSITASL

SEQ ID NO: 94416 - protein, 9 aa, Homo sapiens
  Table A; Target 94416; HLA-C*04:01; TUBA3C; ENSG00000198033; TAA
IVSSITASL

SEQ ID NO: 94417 - protein, 9 aa, Homo sapiens
  Table A; Target 94417; HLA-C*05:01; TUBA3C; ENSG00000198033; TAA
IVSSITASL

SEQ ID NO: 94418 - protein, 9 aa, Homo sapiens
  Table A; Target 94418; HLA-C*06:02; TUBA3C; ENSG00000198033; TAA
IVSSITASL

SEQ ID NO: 94419 - protein, 9 aa, Homo sapiens
  Table A; Target 94419; HLA-C*07:02; TUBA3C; ENSG00000198033; TAA
IVSSITASL

SEQ ID NO: 94420 - protein, 9 aa, Homo sapiens
  Table A; Target 94420; HLA-C*07:04; TUBA3C; ENSG00000198033; TAA
IVSSITASL

SEQ ID NO: 94421 - protein, 9 aa, Homo sapiens
  Table A; Target 94421; HLA-C*07:06; TUBA3C; ENSG00000198033; TAA
IVSSITASL

SEQ ID NO: 94422 - protein, 9 aa, Homo sapiens
  Table A; Target 94422; HLA-C*12:03; TUBA3C; ENSG00000198033; TAA
IVSSITASL

SEQ ID NO: 94423 - protein, 9 aa, Homo sapiens
  Table A; Target 94423; HLA-C*14:02; TUBA3C; ENSG00000198033; TAA
IVSSITASL

SEQ ID NO: 94424 - protein, 9 aa, Homo sapiens
  Table A; Target 94424; HLA-C*16:01; TUBA3C; ENSG00000198033; TAA
IVSSITASL

SEQ ID NO: 94425 - protein, 9 aa, Homo sapiens
  Table A; Target 94425; HLA-C*16:02; TUBA3C; ENSG00000198033; TAA
IVSSITASL

SEQ ID NO: 94426 - protein, 9 aa, Homo sapiens
  Table A; Target 94426; HLA-C*16:04; TUBA3C; ENSG00000198033; TAA
IVSSITASL

SEQ ID NO: 94427 - protein, 10 aa, Homo sapiens
  Table A; Target 94427; HLA-A*03:01; TUBA3C; ENSG00000198033; TAA
IVSSITASLR

SEQ ID NO: 94428 - protein, 10 aa, Homo sapiens
  Table A; Target 94428; HLA-A*03:02; TUBA3C; ENSG00000198033; TAA
IVSSITASLR

SEQ ID NO: 94429 - protein, 10 aa, Homo sapiens
  Table A; Target 94429; HLA-A*11:01; TUBA3C; ENSG00000198033; TAA
IVSSITASLR

SEQ ID NO: 94430 - protein, 10 aa, Homo sapiens
  Table A; Target 94430; HLA-A*29:02; TUBA3C; ENSG00000198033; TAA
IVSSITASLR

SEQ ID NO: 94431 - protein, 10 aa, Homo sapiens
  Table A; Target 94431; HLA-A*31:01; TUBA3C; ENSG00000198033; TAA
IVSSITASLR

SEQ ID NO: 94432 - protein, 10 aa, Homo sapiens
  Table A; Target 94432; HLA-A*33:01; TUBA3C; ENSG00000198033; TAA
IVSSITASLR

SEQ ID NO: 94433 - protein, 10 aa, Homo sapiens
  Table A; Target 94433; HLA-A*33:03; TUBA3C; ENSG00000198033; TAA
IVSSITASLR

SEQ ID NO: 94434 - protein, 10 aa, Homo sapiens
  Table A; Target 94434; HLA-A*68:01; TUBA3C; ENSG00000198033; TAA
IVSSITASLR

SEQ ID NO: 94435 - protein, 10 aa, Homo sapiens
  Table A; Target 94435; HLA-A*68:02; TUBA3C; ENSG00000198033; TAA
IVSSITASLR

SEQ ID NO: 94436 - protein, 10 aa, Homo sapiens
  Table A; Target 94436; HLA-B*27:02; TUBA3C; ENSG00000198033; TAA
IVSSITASLR

SEQ ID NO: 94437 - protein, 10 aa, Homo sapiens
  Table A; Target 94437; HLA-B*57:01; TUBA3C; ENSG00000198033; TAA
IVSSITASLR

SEQ ID NO: 94438 - protein, 10 aa, Homo sapiens
  Table A; Target 94438; HLA-C*07:06; TUBA3C; ENSG00000198033; TAA
IVSSITASLR

SEQ ID NO: 94439 - protein, 11 aa, Homo sapiens
  Table A; Target 94439; HLA-A*02:07; TUBA3C; ENSG00000198033; TAA
IVSSITASLRF

SEQ ID NO: 94440 - protein, 11 aa, Homo sapiens
  Table A; Target 94440; HLA-A*03:01; TUBA3C; ENSG00000198033; TAA
IVSSITASLRF

SEQ ID NO: 94441 - protein, 11 aa, Homo sapiens
  Table A; Target 94441; HLA-A*03:02; TUBA3C; ENSG00000198033; TAA
IVSSITASLRF

SEQ ID NO: 94442 - protein, 11 aa, Homo sapiens
  Table A; Target 94442; HLA-A*23:01; TUBA3C; ENSG00000198033; TAA
IVSSITASLRF

SEQ ID NO: 94443 - protein, 11 aa, Homo sapiens
  Table A; Target 94443; HLA-A*24:02; TUBA3C; ENSG00000198033; TAA
IVSSITASLRF

SEQ ID NO: 94444 - protein, 11 aa, Homo sapiens
  Table A; Target 94444; HLA-A*25:01; TUBA3C; ENSG00000198033; TAA
IVSSITASLRF

SEQ ID NO: 94445 - protein, 11 aa, Homo sapiens
  Table A; Target 94445; HLA-A*26:01; TUBA3C; ENSG00000198033; TAA
IVSSITASLRF

SEQ ID NO: 94446 - protein, 11 aa, Homo sapiens
  Table A; Target 94446; HLA-A*29:02; TUBA3C; ENSG00000198033; TAA
IVSSITASLRF

SEQ ID NO: 94447 - protein, 11 aa, Homo sapiens
  Table A; Target 94447; HLA-A*30:02; TUBA3C; ENSG00000198033; TAA
IVSSITASLRF

SEQ ID NO: 94448 - protein, 11 aa, Homo sapiens
  Table A; Target 94448; HLA-A*32:01; TUBA3C; ENSG00000198033; TAA
IVSSITASLRF

SEQ ID NO: 94449 - protein, 11 aa, Homo sapiens
  Table A; Target 94449; HLA-B*27:05; TUBA3C; ENSG00000198033; TAA
IVSSITASLRF

SEQ ID NO: 94450 - protein, 11 aa, Homo sapiens
  Table A; Target 94450; HLA-B*35:01; TUBA3C; ENSG00000198033; TAA
IVSSITASLRF

SEQ ID NO: 94451 - protein, 11 aa, Homo sapiens
  Table A; Target 94451; HLA-B*38:01; TUBA3C; ENSG00000198033; TAA
IVSSITASLRF

SEQ ID NO: 94452 - protein, 11 aa, Homo sapiens
  Table A; Target 94452; HLA-B*57:01; TUBA3C; ENSG00000198033; TAA
IVSSITASLRF

SEQ ID NO: 94453 - protein, 11 aa, Homo sapiens
  Table A; Target 94453; HLA-B*58:01; TUBA3C; ENSG00000198033; TAA
IVSSITASLRF

SEQ ID NO: 94454 - protein, 11 aa, Homo sapiens
  Table A; Target 94454; HLA-C*02:02; TUBA3C; ENSG00000198033; TAA
IVSSITASLRF

SEQ ID NO: 94455 - protein, 9 aa, Homo sapiens
  Table A; Target 94455; HLA-A*24:02; TUBA3C; ENSG00000198033; TAA
IYDICRRNL

SEQ ID NO: 94456 - protein, 9 aa, Homo sapiens
  Table A; Target 94456; HLA-C*04:01; TUBA3C; ENSG00000198033; TAA
IYDICRRNL

SEQ ID NO: 94457 - protein, 8 aa, Homo sapiens
  Table A; Target 94457; HLA-C*07:01; TUBA3C; ENSG00000198033; TAA
IYPAPQVS

SEQ ID NO: 94458 - protein, 8 aa, Homo sapiens
  Table A; Target 94458; HLA-C*07:02; TUBA3C; ENSG00000198033; TAA
IYPAPQVS

SEQ ID NO: 94459 - protein, 9 aa, Homo sapiens
  Table A; Target 94459; HLA-A*23:01; TUBA3C; ENSG00000198033; TAA
IYPAPQVST

SEQ ID NO: 94460 - protein, 9 aa, Homo sapiens
  Table A; Target 94460; HLA-A*24:02; TUBA3C; ENSG00000198033; TAA
IYPAPQVST

SEQ ID NO: 94461 - protein, 9 aa, Homo sapiens
  Table A; Target 94461; HLA-A*31:01; TUBA3C; ENSG00000198033; TAA
IYPAPQVST

SEQ ID NO: 94462 - protein, 9 aa, Homo sapiens
  Table A; Target 94462; HLA-A*32:01; TUBA3C; ENSG00000198033; TAA
IYPAPQVST

SEQ ID NO: 94463 - protein, 9 aa, Homo sapiens
  Table A; Target 94463; HLA-B*07:02; TUBA3C; ENSG00000198033; TAA
IYPAPQVST

SEQ ID NO: 94464 - protein, 9 aa, Homo sapiens
  Table A; Target 94464; HLA-B*46:01; TUBA3C; ENSG00000198033; TAA
IYPAPQVST

SEQ ID NO: 94465 - protein, 9 aa, Homo sapiens
  Table A; Target 94465; HLA-C*01:02; TUBA3C; ENSG00000198033; TAA
IYPAPQVST

SEQ ID NO: 94466 - protein, 9 aa, Homo sapiens
  Table A; Target 94466; HLA-C*04:01; TUBA3C; ENSG00000198033; TAA
IYPAPQVST

SEQ ID NO: 94467 - protein, 9 aa, Homo sapiens
  Table A; Target 94467; HLA-C*06:02; TUBA3C; ENSG00000198033; TAA
IYPAPQVST

SEQ ID NO: 94468 - protein, 9 aa, Homo sapiens
  Table A; Target 94468; HLA-C*07:01; TUBA3C; ENSG00000198033; TAA
IYPAPQVST

SEQ ID NO: 94469 - protein, 9 aa, Homo sapiens
  Table A; Target 94469; HLA-C*07:02; TUBA3C; ENSG00000198033; TAA
IYPAPQVST

SEQ ID NO: 94470 - protein, 9 aa, Homo sapiens
  Table A; Target 94470; HLA-C*14:02; TUBA3C; ENSG00000198033; TAA
IYPAPQVST

SEQ ID NO: 94471 - protein, 9 aa, Homo sapiens
  Table A; Target 94471; HLA-C*16:01; TUBA3C; ENSG00000198033; TAA
IYPAPQVST

SEQ ID NO: 94472 - protein, 10 aa, Homo sapiens
  Table A; Target 94472; HLA-A*23:01; TUBA3C; ENSG00000198033; TAA
IYPAPQVSTA

SEQ ID NO: 94473 - protein, 10 aa, Homo sapiens
  Table A; Target 94473; HLA-A*24:02; TUBA3C; ENSG00000198033; TAA
IYPAPQVSTA

SEQ ID NO: 94474 - protein, 10 aa, Homo sapiens
  Table A; Target 94474; HLA-B*07:02; TUBA3C; ENSG00000198033; TAA
IYPAPQVSTA

SEQ ID NO: 94475 - protein, 10 aa, Homo sapiens
  Table A; Target 94475; HLA-C*01:02; TUBA3C; ENSG00000198033; TAA
IYPAPQVSTA

SEQ ID NO: 94476 - protein, 10 aa, Homo sapiens
  Table A; Target 94476; HLA-C*04:01; TUBA3C; ENSG00000198033; TAA
IYPAPQVSTA

SEQ ID NO: 94477 - protein, 10 aa, Homo sapiens
  Table A; Target 94477; HLA-C*06:02; TUBA3C; ENSG00000198033; TAA
IYPAPQVSTA

SEQ ID NO: 94478 - protein, 10 aa, Homo sapiens
  Table A; Target 94478; HLA-C*07:02; TUBA3C; ENSG00000198033; TAA
IYPAPQVSTA

SEQ ID NO: 94479 - protein, 10 aa, Homo sapiens
  Table A; Target 94479; HLA-C*14:02; TUBA3C; ENSG00000198033; TAA
IYPAPQVSTA

SEQ ID NO: 94480 - protein, 11 aa, Homo sapiens
  Table A; Target 94480; HLA-A*23:01; TUBA3C; ENSG00000198033; TAA
IYPAPQVSTAV

SEQ ID NO: 94481 - protein, 11 aa, Homo sapiens
  Table A; Target 94481; HLA-A*24:02; TUBA3C; ENSG00000198033; TAA
IYPAPQVSTAV

SEQ ID NO: 94482 - protein, 11 aa, Homo sapiens
  Table A; Target 94482; HLA-C*04:01; TUBA3C; ENSG00000198033; TAA
IYPAPQVSTAV

SEQ ID NO: 94483 - protein, 11 aa, Homo sapiens
  Table A; Target 94483; HLA-C*07:02; TUBA3C; ENSG00000198033; TAA
IYPAPQVSTAV

SEQ ID NO: 94484 - protein, 11 aa, Homo sapiens
  Table A; Target 94484; HLA-C*14:02; TUBA3C; ENSG00000198033; TAA
IYPAPQVSTAV

SEQ ID NO: 94485 - protein, 9 aa, Homo sapiens
  Table A; Target 94485; HLA-A*02:01; TUBA3C; ENSG00000198033; TAA
KAYHEQLSV

SEQ ID NO: 94486 - protein, 9 aa, Homo sapiens
  Table A; Target 94486; HLA-A*02:03; TUBA3C; ENSG00000198033; TAA
KAYHEQLSV

SEQ ID NO: 94487 - protein, 9 aa, Homo sapiens
  Table A; Target 94487; HLA-A*02:04; TUBA3C; ENSG00000198033; TAA
KAYHEQLSV

SEQ ID NO: 94488 - protein, 9 aa, Homo sapiens
  Table A; Target 94488; HLA-A*02:07; TUBA3C; ENSG00000198033; TAA
KAYHEQLSV

SEQ ID NO: 94489 - protein, 9 aa, Homo sapiens
  Table A; Target 94489; HLA-A*03:01; TUBA3C; ENSG00000198033; TAA
KAYHEQLSV

SEQ ID NO: 94490 - protein, 9 aa, Homo sapiens
  Table A; Target 94490; HLA-A*11:01; TUBA3C; ENSG00000198033; TAA
KAYHEQLSV

SEQ ID NO: 94491 - protein, 9 aa, Homo sapiens
  Table A; Target 94491; HLA-A*25:01; TUBA3C; ENSG00000198033; TAA
KAYHEQLSV

SEQ ID NO: 94492 - protein, 9 aa, Homo sapiens
  Table A; Target 94492; HLA-A*30:01; TUBA3C; ENSG00000198033; TAA
KAYHEQLSV

SEQ ID NO: 94493 - protein, 9 aa, Homo sapiens
  Table A; Target 94493; HLA-A*31:01; TUBA3C; ENSG00000198033; TAA
KAYHEQLSV

SEQ ID NO: 94494 - protein, 9 aa, Homo sapiens
  Table A; Target 94494; HLA-A*32:01; TUBA3C; ENSG00000198033; TAA
KAYHEQLSV

SEQ ID NO: 94495 - protein, 9 aa, Homo sapiens
  Table A; Target 94495; HLA-A*68:02; TUBA3C; ENSG00000198033; TAA
KAYHEQLSV

SEQ ID NO: 94496 - protein, 9 aa, Homo sapiens
  Table A; Target 94496; HLA-B*07:02; TUBA3C; ENSG00000198033; TAA
KAYHEQLSV

SEQ ID NO: 94497 - protein, 9 aa, Homo sapiens
  Table A; Target 94497; HLA-B*08:01; TUBA3C; ENSG00000198033; TAA
KAYHEQLSV

SEQ ID NO: 94498 - protein, 9 aa, Homo sapiens
  Table A; Target 94498; HLA-B*13:02; TUBA3C; ENSG00000198033; TAA
KAYHEQLSV

SEQ ID NO: 94499 - protein, 9 aa, Homo sapiens
  Table A; Target 94499; HLA-B*15:01; TUBA3C; ENSG00000198033; TAA
KAYHEQLSV

SEQ ID NO: 94500 - protein, 9 aa, Homo sapiens
  Table A; Target 94500; HLA-B*15:03; TUBA3C; ENSG00000198033; TAA
KAYHEQLSV

SEQ ID NO: 94501 - protein, 9 aa, Homo sapiens
  Table A; Target 94501; HLA-B*27:05; TUBA3C; ENSG00000198033; TAA
KAYHEQLSV

SEQ ID NO: 94502 - protein, 9 aa, Homo sapiens
  Table A; Target 94502; HLA-B*40:02; TUBA3C; ENSG00000198033; TAA
KAYHEQLSV

SEQ ID NO: 94503 - protein, 9 aa, Homo sapiens
  Table A; Target 94503; HLA-B*46:01; TUBA3C; ENSG00000198033; TAA
KAYHEQLSV

SEQ ID NO: 94504 - protein, 9 aa, Homo sapiens
  Table A; Target 94504; HLA-B*49:01; TUBA3C; ENSG00000198033; TAA
KAYHEQLSV

SEQ ID NO: 94505 - protein, 9 aa, Homo sapiens
  Table A; Target 94505; HLA-B*51:01; TUBA3C; ENSG00000198033; TAA
KAYHEQLSV

SEQ ID NO: 94506 - protein, 9 aa, Homo sapiens
  Table A; Target 94506; HLA-B*54:01; TUBA3C; ENSG00000198033; TAA
KAYHEQLSV

SEQ ID NO: 94507 - protein, 9 aa, Homo sapiens
  Table A; Target 94507; HLA-B*55:01; TUBA3C; ENSG00000198033; TAA
KAYHEQLSV

SEQ ID NO: 94508 - protein, 9 aa, Homo sapiens
  Table A; Target 94508; HLA-B*56:01; TUBA3C; ENSG00000198033; TAA
KAYHEQLSV

SEQ ID NO: 94509 - protein, 9 aa, Homo sapiens
  Table A; Target 94509; HLA-B*57:01; TUBA3C; ENSG00000198033; TAA
KAYHEQLSV

SEQ ID NO: 94510 - protein, 9 aa, Homo sapiens
  Table A; Target 94510; HLA-B*58:01; TUBA3C; ENSG00000198033; TAA
KAYHEQLSV

SEQ ID NO: 94511 - protein, 9 aa, Homo sapiens
  Table A; Target 94511; HLA-C*01:02; TUBA3C; ENSG00000198033; TAA
KAYHEQLSV

SEQ ID NO: 94512 - protein, 9 aa, Homo sapiens
  Table A; Target 94512; HLA-C*02:02; TUBA3C; ENSG00000198033; TAA
KAYHEQLSV

SEQ ID NO: 94513 - protein, 9 aa, Homo sapiens
  Table A; Target 94513; HLA-C*03:03; TUBA3C; ENSG00000198033; TAA
KAYHEQLSV

SEQ ID NO: 94514 - protein, 9 aa, Homo sapiens
  Table A; Target 94514; HLA-C*03:04; TUBA3C; ENSG00000198033; TAA
KAYHEQLSV

SEQ ID NO: 94515 - protein, 9 aa, Homo sapiens
  Table A; Target 94515; HLA-C*05:01; TUBA3C; ENSG00000198033; TAA
KAYHEQLSV

SEQ ID NO: 94516 - protein, 9 aa, Homo sapiens
  Table A; Target 94516; HLA-C*06:02; TUBA3C; ENSG00000198033; TAA
KAYHEQLSV

SEQ ID NO: 94517 - protein, 9 aa, Homo sapiens
  Table A; Target 94517; HLA-C*07:01; TUBA3C; ENSG00000198033; TAA
KAYHEQLSV

SEQ ID NO: 94518 - protein, 9 aa, Homo sapiens
  Table A; Target 94518; HLA-C*07:02; TUBA3C; ENSG00000198033; TAA
KAYHEQLSV

SEQ ID NO: 94519 - protein, 9 aa, Homo sapiens
  Table A; Target 94519; HLA-C*12:03; TUBA3C; ENSG00000198033; TAA
KAYHEQLSV

SEQ ID NO: 94520 - protein, 9 aa, Homo sapiens
  Table A; Target 94520; HLA-C*16:01; TUBA3C; ENSG00000198033; TAA
KAYHEQLSV

SEQ ID NO: 94521 - protein, 9 aa, Homo sapiens
  Table A; Target 94521; HLA-C*16:02; TUBA3C; ENSG00000198033; TAA
KAYHEQLSV

SEQ ID NO: 94522 - protein, 9 aa, Homo sapiens
  Table A; Target 94522; HLA-C*16:04; TUBA3C; ENSG00000198033; TAA
KAYHEQLSV

SEQ ID NO: 94523 - protein, 10 aa, Homo sapiens
  Table A; Target 94523; HLA-A*02:03; TUBA3C; ENSG00000198033; TAA
KAYHEQLSVA

SEQ ID NO: 94524 - protein, 10 aa, Homo sapiens
  Table A; Target 94524; HLA-B*40:02; TUBA3C; ENSG00000198033; TAA
KAYHEQLSVA

SEQ ID NO: 94525 - protein, 10 aa, Homo sapiens
  Table A; Target 94525; HLA-B*54:01; TUBA3C; ENSG00000198033; TAA
KAYHEQLSVA

SEQ ID NO: 94526 - protein, 10 aa, Homo sapiens
  Table A; Target 94526; HLA-B*55:01; TUBA3C; ENSG00000198033; TAA
KAYHEQLSVA

SEQ ID NO: 94527 - protein, 10 aa, Homo sapiens
  Table A; Target 94527; HLA-B*56:01; TUBA3C; ENSG00000198033; TAA
KAYHEQLSVA

SEQ ID NO: 94528 - protein, 10 aa, Homo sapiens
  Table A; Target 94528; HLA-C*06:02; TUBA3C; ENSG00000198033; TAA
KAYHEQLSVA

SEQ ID NO: 94529 - protein, 10 aa, Homo sapiens
  Table A; Target 94529; HLA-C*07:01; TUBA3C; ENSG00000198033; TAA
KAYHEQLSVA

SEQ ID NO: 94530 - protein, 10 aa, Homo sapiens
  Table A; Target 94530; HLA-C*12:03; TUBA3C; ENSG00000198033; TAA
KAYHEQLSVA

SEQ ID NO: 94531 - protein, 10 aa, Homo sapiens
  Table A; Target 94531; HLA-A*30:01; TUBA3C; ENSG00000198033; TAA
KDVNAAIATI

SEQ ID NO: 94532 - protein, 10 aa, Homo sapiens
  Table A; Target 94532; HLA-B*07:02; TUBA3C; ENSG00000198033; TAA
KDVNAAIATI

SEQ ID NO: 94533 - protein, 10 aa, Homo sapiens
  Table A; Target 94533; HLA-B*40:01; TUBA3C; ENSG00000198033; TAA
KDVNAAIATI

SEQ ID NO: 94534 - protein, 10 aa, Homo sapiens
  Table A; Target 94534; HLA-B*40:02; TUBA3C; ENSG00000198033; TAA
KDVNAAIATI

SEQ ID NO: 94535 - protein, 10 aa, Homo sapiens
  Table A; Target 94535; HLA-B*49:01; TUBA3C; ENSG00000198033; TAA
KDVNAAIATI

SEQ ID NO: 94536 - protein, 10 aa, Homo sapiens
  Table A; Target 94536; HLA-C*04:01; TUBA3C; ENSG00000198033; TAA
KDVNAAIATI

SEQ ID NO: 94537 - protein, 10 aa, Homo sapiens
  Table A; Target 94537; HLA-C*06:02; TUBA3C; ENSG00000198033; TAA
KDVNAAIATI

SEQ ID NO: 94538 - protein, 11 aa, Homo sapiens
  Table A; Target 94538; HLA-B*27:02; TUBA3C; ENSG00000198033; TAA
KDVNAAIATIK

SEQ ID NO: 94539 - protein, 8 aa, Homo sapiens
  Table A; Target 94539; HLA-A*30:01; TUBA3C; ENSG00000198033; TAA
KDYEEVGV

SEQ ID NO: 94540 - protein, 8 aa, Homo sapiens
  Table A; Target 94540; HLA-B*37:01; TUBA3C; ENSG00000198033; TAA
KDYEEVGV

SEQ ID NO: 94541 - protein, 8 aa, Homo sapiens
  Table A; Target 94541; HLA-B*40:02; TUBA3C; ENSG00000198033; TAA
KDYEEVGV

SEQ ID NO: 94542 - protein, 8 aa, Homo sapiens
  Table A; Target 94542; HLA-C*06:02; TUBA3C; ENSG00000198033; TAA
KDYEEVGV

SEQ ID NO: 94543 - protein, 10 aa, Homo sapiens
  Table A; Target 94543; HLA-C*06:02; TUBA3C; ENSG00000198033; TAA
KDYEEVGVDS

SEQ ID NO: 94544 - protein, 11 aa, Homo sapiens
  Table A; Target 94544; HLA-A*02:01; TUBA3C; ENSG00000198033; TAA
KDYEEVGVDSV

SEQ ID NO: 94545 - protein, 11 aa, Homo sapiens
  Table A; Target 94545; HLA-A*02:03; TUBA3C; ENSG00000198033; TAA
KDYEEVGVDSV

SEQ ID NO: 94546 - protein, 11 aa, Homo sapiens
  Table A; Target 94546; HLA-A*02:07; TUBA3C; ENSG00000198033; TAA
KDYEEVGVDSV

SEQ ID NO: 94547 - protein, 11 aa, Homo sapiens
  Table A; Target 94547; HLA-A*30:01; TUBA3C; ENSG00000198033; TAA
KDYEEVGVDSV

SEQ ID NO: 94548 - protein, 11 aa, Homo sapiens
  Table A; Target 94548; HLA-A*68:02; TUBA3C; ENSG00000198033; TAA
KDYEEVGVDSV

SEQ ID NO: 94549 - protein, 11 aa, Homo sapiens
  Table A; Target 94549; HLA-B*13:02; TUBA3C; ENSG00000198033; TAA
KDYEEVGVDSV

SEQ ID NO: 94550 - protein, 11 aa, Homo sapiens
  Table A; Target 94550; HLA-B*27:05; TUBA3C; ENSG00000198033; TAA
KDYEEVGVDSV

SEQ ID NO: 94551 - protein, 11 aa, Homo sapiens
  Table A; Target 94551; HLA-B*37:01; TUBA3C; ENSG00000198033; TAA
KDYEEVGVDSV

SEQ ID NO: 94552 - protein, 11 aa, Homo sapiens
  Table A; Target 94552; HLA-B*40:01; TUBA3C; ENSG00000198033; TAA
KDYEEVGVDSV

SEQ ID NO: 94553 - protein, 11 aa, Homo sapiens
  Table A; Target 94553; HLA-B*40:02; TUBA3C; ENSG00000198033; TAA
KDYEEVGVDSV

SEQ ID NO: 94554 - protein, 11 aa, Homo sapiens
  Table A; Target 94554; HLA-B*49:01; TUBA3C; ENSG00000198033; TAA
KDYEEVGVDSV

SEQ ID NO: 94555 - protein, 11 aa, Homo sapiens
  Table A; Target 94555; HLA-B*55:01; TUBA3C; ENSG00000198033; TAA
KDYEEVGVDSV

SEQ ID NO: 94556 - protein, 11 aa, Homo sapiens
  Table A; Target 94556; HLA-C*04:01; TUBA3C; ENSG00000198033; TAA
KDYEEVGVDSV

SEQ ID NO: 94557 - protein, 11 aa, Homo sapiens
  Table A; Target 94557; HLA-C*06:02; TUBA3C; ENSG00000198033; TAA
KDYEEVGVDSV

SEQ ID NO: 94558 - protein, 11 aa, Homo sapiens
  Table A; Target 94558; HLA-C*07:01; TUBA3C; ENSG00000198033; TAA
KDYEEVGVDSV

SEQ ID NO: 94559 - protein, 11 aa, Homo sapiens
  Table A; Target 94559; HLA-C*12:03; TUBA3C; ENSG00000198033; TAA
KDYEEVGVDSV

SEQ ID NO: 94560 - protein, 11 aa, Homo sapiens
  Table A; Target 94560; HLA-C*16:04; TUBA3C; ENSG00000198033; TAA
KDYEEVGVDSV

SEQ ID NO: 94561 - protein, 8 aa, Homo sapiens
  Table A; Target 94561; HLA-A*01:01; TUBA3C; ENSG00000198033; TAA
KEDAANNY

SEQ ID NO: 94562 - protein, 8 aa, Homo sapiens
  Table A; Target 94562; HLA-A*30:02; TUBA3C; ENSG00000198033; TAA
KEDAANNY

SEQ ID NO: 94563 - protein, 8 aa, Homo sapiens
  Table A; Target 94563; HLA-B*15:01; TUBA3C; ENSG00000198033; TAA
KEDAANNY

SEQ ID NO: 94564 - protein, 8 aa, Homo sapiens
  Table A; Target 94564; HLA-B*15:03; TUBA3C; ENSG00000198033; TAA
KEDAANNY

SEQ ID NO: 94565 - protein, 8 aa, Homo sapiens
  Table A; Target 94565; HLA-B*18:01; TUBA3C; ENSG00000198033; TAA
KEDAANNY

SEQ ID NO: 94566 - protein, 8 aa, Homo sapiens
  Table A; Target 94566; HLA-B*27:02; TUBA3C; ENSG00000198033; TAA
KEDAANNY

SEQ ID NO: 94567 - protein, 8 aa, Homo sapiens
  Table A; Target 94567; HLA-B*37:01; TUBA3C; ENSG00000198033; TAA
KEDAANNY

SEQ ID NO: 94568 - protein, 8 aa, Homo sapiens
  Table A; Target 94568; HLA-B*39:01; TUBA3C; ENSG00000198033; TAA
KEDAANNY

SEQ ID NO: 94569 - protein, 8 aa, Homo sapiens
  Table A; Target 94569; HLA-B*44:02; TUBA3C; ENSG00000198033; TAA
KEDAANNY

SEQ ID NO: 94570 - protein, 8 aa, Homo sapiens
  Table A; Target 94570; HLA-B*44:03; TUBA3C; ENSG00000198033; TAA
KEDAANNY

SEQ ID NO: 94571 - protein, 8 aa, Homo sapiens
  Table A; Target 94571; HLA-C*04:01; TUBA3C; ENSG00000198033; TAA
KEDAANNY

SEQ ID NO: 94572 - protein, 8 aa, Homo sapiens
  Table A; Target 94572; HLA-C*05:01; TUBA3C; ENSG00000198033; TAA
KEDAANNY

SEQ ID NO: 94573 - protein, 8 aa, Homo sapiens
  Table A; Target 94573; HLA-C*07:01; TUBA3C; ENSG00000198033; TAA
KEDAANNY

SEQ ID NO: 94574 - protein, 8 aa, Homo sapiens
  Table A; Target 94574; HLA-C*07:04; TUBA3C; ENSG00000198033; TAA
KEDAANNY

SEQ ID NO: 94575 - protein, 8 aa, Homo sapiens
  Table A; Target 94575; HLA-C*12:03; TUBA3C; ENSG00000198033; TAA
KEDAANNY

SEQ ID NO: 94576 - protein, 8 aa, Homo sapiens
  Table A; Target 94576; HLA-C*16:02; TUBA3C; ENSG00000198033; TAA
KEDAANNY

SEQ ID NO: 94577 - protein, 8 aa, Homo sapiens
  Table A; Target 94577; HLA-C*16:04; TUBA3C; ENSG00000198033; TAA
KEDAANNY

SEQ ID NO: 94578 - protein, 9 aa, Homo sapiens
  Table A; Target 94578; HLA-B*27:05; TUBA3C; ENSG00000198033; TAA
KEDAANNYA

SEQ ID NO: 94579 - protein, 9 aa, Homo sapiens
  Table A; Target 94579; HLA-B*39:01; TUBA3C; ENSG00000198033; TAA
KEDAANNYA

SEQ ID NO: 94580 - protein, 9 aa, Homo sapiens
  Table A; Target 94580; HLA-B*40:01; TUBA3C; ENSG00000198033; TAA
KEDAANNYA

SEQ ID NO: 94581 - protein, 9 aa, Homo sapiens
  Table A; Target 94581; HLA-B*40:02; TUBA3C; ENSG00000198033; TAA
KEDAANNYA

SEQ ID NO: 94582 - protein, 9 aa, Homo sapiens
  Table A; Target 94582; HLA-B*49:01; TUBA3C; ENSG00000198033; TAA
KEDAANNYA

SEQ ID NO: 94583 - protein, 9 aa, Homo sapiens
  Table A; Target 94583; HLA-C*06:02; TUBA3C; ENSG00000198033; TAA
KEDAANNYA

SEQ ID NO: 94584 - protein, 10 aa, Homo sapiens
  Table A; Target 94584; HLA-B*27:02; TUBA3C; ENSG00000198033; TAA
KEDAANNYAR

SEQ ID NO: 94585 - protein, 10 aa, Homo sapiens
  Table A; Target 94585; HLA-B*27:05; TUBA3C; ENSG00000198033; TAA
KEDAANNYAR

SEQ ID NO: 94586 - protein, 10 aa, Homo sapiens
  Table A; Target 94586; HLA-B*40:01; TUBA3C; ENSG00000198033; TAA
KEDAANNYAR

SEQ ID NO: 94587 - protein, 10 aa, Homo sapiens
  Table A; Target 94587; HLA-B*40:02; TUBA3C; ENSG00000198033; TAA
KEDAANNYAR

SEQ ID NO: 94588 - protein, 10 aa, Homo sapiens
  Table A; Target 94588; HLA-B*44:02; TUBA3C; ENSG00000198033; TAA
KEDAANNYAR

SEQ ID NO: 94589 - protein, 10 aa, Homo sapiens
  Table A; Target 94589; HLA-B*44:03; TUBA3C; ENSG00000198033; TAA
KEDAANNYAR

SEQ ID NO: 94590 - protein, 10 aa, Homo sapiens
  Table A; Target 94590; HLA-B*49:01; TUBA3C; ENSG00000198033; TAA
KEDAANNYAR

SEQ ID NO: 94591 - protein, 10 aa, Homo sapiens
  Table A; Target 94591; HLA-C*06:02; TUBA3C; ENSG00000198033; TAA
KEDAANNYAR

SEQ ID NO: 94592 - protein, 8 aa, Homo sapiens
  Table A; Target 94592; HLA-A*30:01; TUBA3C; ENSG00000198033; TAA
KEIVDLVL

SEQ ID NO: 94593 - protein, 8 aa, Homo sapiens
  Table A; Target 94593; HLA-B*18:01; TUBA3C; ENSG00000198033; TAA
KEIVDLVL

SEQ ID NO: 94594 - protein, 8 aa, Homo sapiens
  Table A; Target 94594; HLA-B*37:01; TUBA3C; ENSG00000198033; TAA
KEIVDLVL

SEQ ID NO: 94595 - protein, 8 aa, Homo sapiens
  Table A; Target 94595; HLA-B*40:01; TUBA3C; ENSG00000198033; TAA
KEIVDLVL

SEQ ID NO: 94596 - protein, 8 aa, Homo sapiens
  Table A; Target 94596; HLA-B*40:02; TUBA3C; ENSG00000198033; TAA
KEIVDLVL

SEQ ID NO: 94597 - protein, 8 aa, Homo sapiens
  Table A; Target 94597; HLA-B*49:01; TUBA3C; ENSG00000198033; TAA
KEIVDLVL

SEQ ID NO: 94598 - protein, 10 aa, Homo sapiens
  Table A; Target 94598; HLA-B*27:02; TUBA3C; ENSG00000198033; TAA
KEIVDLVLDR

SEQ ID NO: 94599 - protein, 11 aa, Homo sapiens
  Table A; Target 94599; HLA-B*44:02; TUBA3C; ENSG00000198033; TAA
KEIVDLVLDRI

SEQ ID NO: 94600 - protein, 11 aa, Homo sapiens
  Table A; Target 94600; HLA-B*44:03; TUBA3C; ENSG00000198033; TAA
KEIVDLVLDRI

SEQ ID NO: 94601 - protein, 11 aa, Homo sapiens
  Table A; Target 94601; HLA-B*49:01; TUBA3C; ENSG00000198033; TAA
KEIVDLVLDRI

SEQ ID NO: 94602 - protein, 8 aa, Homo sapiens
  Table A; Target 94602; HLA-C*04:01; TUBA3C; ENSG00000198033; TAA
KFDLMYAK

SEQ ID NO: 94603 - protein, 8 aa, Homo sapiens
  Table A; Target 94603; HLA-C*07:01; TUBA3C; ENSG00000198033; TAA
KFDLMYAK

SEQ ID NO: 94604 - protein, 9 aa, Homo sapiens
  Table A; Target 94604; HLA-A*31:01; TUBA3C; ENSG00000198033; TAA
KFDLMYAKR

SEQ ID NO: 94605 - protein, 9 aa, Homo sapiens
  Table A; Target 94605; HLA-A*02:01; TUBA3C; ENSG00000198033; TAA
KLADLCTGL

SEQ ID NO: 94606 - protein, 9 aa, Homo sapiens
  Table A; Target 94606; HLA-A*02:03; TUBA3C; ENSG00000198033; TAA
KLADLCTGL

SEQ ID NO: 94607 - protein, 9 aa, Homo sapiens
  Table A; Target 94607; HLA-A*02:04; TUBA3C; ENSG00000198033; TAA
KLADLCTGL

SEQ ID NO: 94608 - protein, 9 aa, Homo sapiens
  Table A; Target 94608; HLA-A*02:07; TUBA3C; ENSG00000198033; TAA
KLADLCTGL

SEQ ID NO: 94609 - protein, 9 aa, Homo sapiens
  Table A; Target 94609; HLA-A*03:01; TUBA3C; ENSG00000198033; TAA
KLADLCTGL

SEQ ID NO: 94610 - protein, 9 aa, Homo sapiens
  Table A; Target 94610; HLA-A*03:02; TUBA3C; ENSG00000198033; TAA
KLADLCTGL

SEQ ID NO: 94611 - protein, 9 aa, Homo sapiens
  Table A; Target 94611; HLA-A*31:01; TUBA3C; ENSG00000198033; TAA
KLADLCTGL

SEQ ID NO: 94612 - protein, 9 aa, Homo sapiens
  Table A; Target 94612; HLA-A*32:01; TUBA3C; ENSG00000198033; TAA
KLADLCTGL

SEQ ID NO: 94613 - protein, 9 aa, Homo sapiens
  Table A; Target 94613; HLA-A*68:02; TUBA3C; ENSG00000198033; TAA
KLADLCTGL

SEQ ID NO: 94614 - protein, 9 aa, Homo sapiens
  Table A; Target 94614; HLA-B*13:02; TUBA3C; ENSG00000198033; TAA
KLADLCTGL

SEQ ID NO: 94615 - protein, 9 aa, Homo sapiens
  Table A; Target 94615; HLA-B*15:01; TUBA3C; ENSG00000198033; TAA
KLADLCTGL

SEQ ID NO: 94616 - protein, 9 aa, Homo sapiens
  Table A; Target 94616; HLA-B*15:03; TUBA3C; ENSG00000198033; TAA
KLADLCTGL

SEQ ID NO: 94617 - protein, 9 aa, Homo sapiens
  Table A; Target 94617; HLA-B*27:05; TUBA3C; ENSG00000198033; TAA
KLADLCTGL

SEQ ID NO: 94618 - protein, 9 aa, Homo sapiens
  Table A; Target 94618; HLA-B*55:01; TUBA3C; ENSG00000198033; TAA
KLADLCTGL

SEQ ID NO: 94619 - protein, 9 aa, Homo sapiens
  Table A; Target 94619; HLA-B*58:01; TUBA3C; ENSG00000198033; TAA
KLADLCTGL

SEQ ID NO: 94620 - protein, 9 aa, Homo sapiens
  Table A; Target 94620; HLA-C*01:02; TUBA3C; ENSG00000198033; TAA
KLADLCTGL

SEQ ID NO: 94621 - protein, 9 aa, Homo sapiens
  Table A; Target 94621; HLA-C*06:02; TUBA3C; ENSG00000198033; TAA
KLADLCTGL

SEQ ID NO: 94622 - protein, 9 aa, Homo sapiens
  Table A; Target 94622; HLA-C*07:02; TUBA3C; ENSG00000198033; TAA
KLADLCTGL

SEQ ID NO: 94623 - protein, 9 aa, Homo sapiens
  Table A; Target 94623; HLA-C*07:04; TUBA3C; ENSG00000198033; TAA
KLADLCTGL

SEQ ID NO: 94624 - protein, 9 aa, Homo sapiens
  Table A; Target 94624; HLA-C*12:03; TUBA3C; ENSG00000198033; TAA
KLADLCTGL

SEQ ID NO: 94625 - protein, 9 aa, Homo sapiens
  Table A; Target 94625; HLA-C*16:02; TUBA3C; ENSG00000198033; TAA
KLADLCTGL

SEQ ID NO: 94626 - protein, 10 aa, Homo sapiens
  Table A; Target 94626; HLA-C*07:01; TUBA3C; ENSG00000198033; TAA
KLADLCTGLQ

SEQ ID NO: 94627 - protein, 8 aa, Homo sapiens
  Table A; Target 94627; HLA-B*57:01; TUBA3C; ENSG00000198033; TAA
KSKLEFAI

SEQ ID NO: 94628 - protein, 9 aa, Homo sapiens
  Table A; Target 94628; HLA-A*01:01; TUBA3C; ENSG00000198033; TAA
KSKLEFAIY

SEQ ID NO: 94629 - protein, 9 aa, Homo sapiens
  Table A; Target 94629; HLA-A*30:02; TUBA3C; ENSG00000198033; TAA
KSKLEFAIY

SEQ ID NO: 94630 - protein, 9 aa, Homo sapiens
  Table A; Target 94630; HLA-A*31:01; TUBA3C; ENSG00000198033; TAA
KSKLEFAIY

SEQ ID NO: 94631 - protein, 9 aa, Homo sapiens
  Table A; Target 94631; HLA-B*57:01; TUBA3C; ENSG00000198033; TAA
KSKLEFAIY

SEQ ID NO: 94632 - protein, 10 aa, Homo sapiens
  Table A; Target 94632; HLA-A*23:01; TUBA3C; ENSG00000198033; TAA
KTIGGGDDSF

SEQ ID NO: 94633 - protein, 10 aa, Homo sapiens
  Table A; Target 94633; HLA-A*25:01; TUBA3C; ENSG00000198033; TAA
KTIGGGDDSF

SEQ ID NO: 94634 - protein, 10 aa, Homo sapiens
  Table A; Target 94634; HLA-A*26:01; TUBA3C; ENSG00000198033; TAA
KTIGGGDDSF

SEQ ID NO: 94635 - protein, 10 aa, Homo sapiens
  Table A; Target 94635; HLA-A*30:02; TUBA3C; ENSG00000198033; TAA
KTIGGGDDSF

SEQ ID NO: 94636 - protein, 10 aa, Homo sapiens
  Table A; Target 94636; HLA-A*32:01; TUBA3C; ENSG00000198033; TAA
KTIGGGDDSF

SEQ ID NO: 94637 - protein, 10 aa, Homo sapiens
  Table A; Target 94637; HLA-B*15:01; TUBA3C; ENSG00000198033; TAA
KTIGGGDDSF

SEQ ID NO: 94638 - protein, 10 aa, Homo sapiens
  Table A; Target 94638; HLA-B*15:03; TUBA3C; ENSG00000198033; TAA
KTIGGGDDSF

SEQ ID NO: 94639 - protein, 10 aa, Homo sapiens
  Table A; Target 94639; HLA-B*27:02; TUBA3C; ENSG00000198033; TAA
KTIGGGDDSF

SEQ ID NO: 94640 - protein, 10 aa, Homo sapiens
  Table A; Target 94640; HLA-B*27:05; TUBA3C; ENSG00000198033; TAA
KTIGGGDDSF

SEQ ID NO: 94641 - protein, 10 aa, Homo sapiens
  Table A; Target 94641; HLA-B*38:01; TUBA3C; ENSG00000198033; TAA
KTIGGGDDSF

SEQ ID NO: 94642 - protein, 10 aa, Homo sapiens
  Table A; Target 94642; HLA-B*39:01; TUBA3C; ENSG00000198033; TAA
KTIGGGDDSF

SEQ ID NO: 94643 - protein, 10 aa, Homo sapiens
  Table A; Target 94643; HLA-B*40:01; TUBA3C; ENSG00000198033; TAA
KTIGGGDDSF

SEQ ID NO: 94644 - protein, 10 aa, Homo sapiens
  Table A; Target 94644; HLA-B*40:02; TUBA3C; ENSG00000198033; TAA
KTIGGGDDSF

SEQ ID NO: 94645 - protein, 10 aa, Homo sapiens
  Table A; Target 94645; HLA-B*44:03; TUBA3C; ENSG00000198033; TAA
KTIGGGDDSF

SEQ ID NO: 94646 - protein, 10 aa, Homo sapiens
  Table A; Target 94646; HLA-B*46:01; TUBA3C; ENSG00000198033; TAA
KTIGGGDDSF

SEQ ID NO: 94647 - protein, 10 aa, Homo sapiens
  Table A; Target 94647; HLA-B*55:01; TUBA3C; ENSG00000198033; TAA
KTIGGGDDSF

SEQ ID NO: 94648 - protein, 10 aa, Homo sapiens
  Table A; Target 94648; HLA-B*57:01; TUBA3C; ENSG00000198033; TAA
KTIGGGDDSF

SEQ ID NO: 94649 - protein, 10 aa, Homo sapiens
  Table A; Target 94649; HLA-B*58:01; TUBA3C; ENSG00000198033; TAA
KTIGGGDDSF

SEQ ID NO: 94650 - protein, 10 aa, Homo sapiens
  Table A; Target 94650; HLA-C*01:02; TUBA3C; ENSG00000198033; TAA
KTIGGGDDSF

SEQ ID NO: 94651 - protein, 10 aa, Homo sapiens
  Table A; Target 94651; HLA-C*03:04; TUBA3C; ENSG00000198033; TAA
KTIGGGDDSF

SEQ ID NO: 94652 - protein, 10 aa, Homo sapiens
  Table A; Target 94652; HLA-C*04:01; TUBA3C; ENSG00000198033; TAA
KTIGGGDDSF

SEQ ID NO: 94653 - protein, 10 aa, Homo sapiens
  Table A; Target 94653; HLA-C*05:01; TUBA3C; ENSG00000198033; TAA
KTIGGGDDSF

SEQ ID NO: 94654 - protein, 10 aa, Homo sapiens
  Table A; Target 94654; HLA-C*06:02; TUBA3C; ENSG00000198033; TAA
KTIGGGDDSF

SEQ ID NO: 94655 - protein, 10 aa, Homo sapiens
  Table A; Target 94655; HLA-C*07:02; TUBA3C; ENSG00000198033; TAA
KTIGGGDDSF

SEQ ID NO: 94656 - protein, 10 aa, Homo sapiens
  Table A; Target 94656; HLA-C*07:04; TUBA3C; ENSG00000198033; TAA
KTIGGGDDSF

SEQ ID NO: 94657 - protein, 10 aa, Homo sapiens
  Table A; Target 94657; HLA-C*12:03; TUBA3C; ENSG00000198033; TAA
KTIGGGDDSF

SEQ ID NO: 94658 - protein, 10 aa, Homo sapiens
  Table A; Target 94658; HLA-C*14:02; TUBA3C; ENSG00000198033; TAA
KTIGGGDDSF

SEQ ID NO: 94659 - protein, 10 aa, Homo sapiens
  Table A; Target 94659; HLA-C*16:02; TUBA3C; ENSG00000198033; TAA
KTIGGGDDSF

SEQ ID NO: 94660 - protein, 10 aa, Homo sapiens
  Table A; Target 94660; HLA-C*16:04; TUBA3C; ENSG00000198033; TAA
KTIGGGDDSF

SEQ ID NO: 94661 - protein, 8 aa, Homo sapiens
  Table A; Target 94661; HLA-B*40:02; TUBA3C; ENSG00000198033; TAA
KTKRTIQF

SEQ ID NO: 94662 - protein, 8 aa, Homo sapiens
  Table A; Target 94662; HLA-B*57:01; TUBA3C; ENSG00000198033; TAA
KTKRTIQF

SEQ ID NO: 94663 - protein, 9 aa, Homo sapiens
  Table A; Target 94663; HLA-B*40:02; TUBA3C; ENSG00000198033; TAA
KTKRTIQFV

SEQ ID NO: 94664 - protein, 11 aa, Homo sapiens
  Table A; Target 94664; HLA-B*57:01; TUBA3C; ENSG00000198033; TAA
KTKRTIQFVDW

SEQ ID NO: 94665 - protein, 8 aa, Homo sapiens
  Table A; Target 94665; HLA-B*40:02; TUBA3C; ENSG00000198033; TAA
KVQRAVCM

SEQ ID NO: 94666 - protein, 9 aa, Homo sapiens
  Table A; Target 94666; HLA-A*31:01; TUBA3C; ENSG00000198033; TAA
KVQRAVCML

SEQ ID NO: 94667 - protein, 9 aa, Homo sapiens
  Table A; Target 94667; HLA-B*07:02; TUBA3C; ENSG00000198033; TAA
KVQRAVCML

SEQ ID NO: 94668 - protein, 9 aa, Homo sapiens
  Table A; Target 94668; HLA-C*04:01; TUBA3C; ENSG00000198033; TAA
KVQRAVCML

SEQ ID NO: 94669 - protein, 9 aa, Homo sapiens
  Table A; Target 94669; HLA-C*06:02; TUBA3C; ENSG00000198033; TAA
KVQRAVCML

SEQ ID NO: 94670 - protein, 9 aa, Homo sapiens
  Table A; Target 94670; HLA-C*07:02; TUBA3C; ENSG00000198033; TAA
KVQRAVCML

SEQ ID NO: 94671 - protein, 9 aa, Homo sapiens
  Table A; Target 94671; HLA-C*07:04; TUBA3C; ENSG00000198033; TAA
KVQRAVCML

SEQ ID NO: 94672 - protein, 9 aa, Homo sapiens
  Table A; Target 94672; HLA-C*07:01; TUBA3C; ENSG00000198033; TAA
KYMACCMLY

SEQ ID NO: 94673 - protein, 8 aa, Homo sapiens
  Table A; Target 94673; HLA-B*39:01; TUBA3C; ENSG00000198033; TAA
LAALEKDY

SEQ ID NO: 94674 - protein, 8 aa, Homo sapiens
  Table A; Target 94674; HLA-C*03:03; TUBA3C; ENSG00000198033; TAA
LAALEKDY

SEQ ID NO: 94675 - protein, 8 aa, Homo sapiens
  Table A; Target 94675; HLA-C*07:01; TUBA3C; ENSG00000198033; TAA
LAALEKDY

SEQ ID NO: 94676 - protein, 8 aa, Homo sapiens
  Table A; Target 94676; HLA-C*12:03; TUBA3C; ENSG00000198033; TAA
LAALEKDY

SEQ ID NO: 94677 - protein, 8 aa, Homo sapiens
  Table A; Target 94677; HLA-C*16:01; TUBA3C; ENSG00000198033; TAA
LAALEKDY

SEQ ID NO: 94678 - protein, 8 aa, Homo sapiens
  Table A; Target 94678; HLA-C*16:02; TUBA3C; ENSG00000198033; TAA
LAALEKDY

SEQ ID NO: 94679 - protein, 8 aa, Homo sapiens
  Table A; Target 94679; HLA-B*27:05; TUBA3C; ENSG00000198033; TAA
LADLCTGL

SEQ ID NO: 94680 - protein, 8 aa, Homo sapiens
  Table A; Target 94680; HLA-C*04:01; TUBA3C; ENSG00000198033; TAA
LADLCTGL

SEQ ID NO: 94681 - protein, 8 aa, Homo sapiens
  Table A; Target 94681; HLA-C*05:01; TUBA3C; ENSG00000198033; TAA
LADLCTGL

SEQ ID NO: 94682 - protein, 8 aa, Homo sapiens
  Table A; Target 94682; HLA-C*07:01; TUBA3C; ENSG00000198033; TAA
LADLCTGL

SEQ ID NO: 94683 - protein, 11 aa, Homo sapiens
  Table A; Target 94683; HLA-A*01:01; TUBA3C; ENSG00000198033; TAA
LADLCTGLQGF

SEQ ID NO: 94684 - protein, 8 aa, Homo sapiens
  Table A; Target 94684; HLA-B*08:01; TUBA3C; ENSG00000198033; TAA
LAKVQRAV

SEQ ID NO: 94685 - protein, 8 aa, Homo sapiens
  Table A; Target 94685; HLA-B*46:01; TUBA3C; ENSG00000198033; TAA
LAKVQRAV

SEQ ID NO: 94686 - protein, 8 aa, Homo sapiens
  Table A; Target 94686; HLA-B*51:01; TUBA3C; ENSG00000198033; TAA
LAKVQRAV

SEQ ID NO: 94687 - protein, 8 aa, Homo sapiens
  Table A; Target 94687; HLA-B*54:01; TUBA3C; ENSG00000198033; TAA
LAKVQRAV

SEQ ID NO: 94688 - protein, 8 aa, Homo sapiens
  Table A; Target 94688; HLA-C*06:02; TUBA3C; ENSG00000198033; TAA
LAKVQRAV

SEQ ID NO: 94689 - protein, 8 aa, Homo sapiens
  Table A; Target 94689; HLA-C*16:01; TUBA3C; ENSG00000198033; TAA
LAKVQRAV

SEQ ID NO: 94690 - protein, 8 aa, Homo sapiens
  Table A; Target 94690; HLA-C*16:02; TUBA3C; ENSG00000198033; TAA
LAKVQRAV

SEQ ID NO: 94691 - protein, 9 aa, Homo sapiens
  Table A; Target 94691; HLA-B*08:01; TUBA3C; ENSG00000198033; TAA
LAKVQRAVC

SEQ ID NO: 94692 - protein, 9 aa, Homo sapiens
  Table A; Target 94692; HLA-B*54:01; TUBA3C; ENSG00000198033; TAA
LAKVQRAVC

SEQ ID NO: 94693 - protein, 8 aa, Homo sapiens
  Table A; Target 94693; HLA-A*23:01; TUBA3C; ENSG00000198033; TAA
LATYAPVI

SEQ ID NO: 94694 - protein, 8 aa, Homo sapiens
  Table A; Target 94694; HLA-B*07:02; TUBA3C; ENSG00000198033; TAA
LATYAPVI

SEQ ID NO: 94695 - protein, 8 aa, Homo sapiens
  Table A; Target 94695; HLA-B*13:02; TUBA3C; ENSG00000198033; TAA
LATYAPVI

SEQ ID NO: 94696 - protein, 8 aa, Homo sapiens
  Table A; Target 94696; HLA-B*35:03; TUBA3C; ENSG00000198033; TAA
LATYAPVI

SEQ ID NO: 94697 - protein, 8 aa, Homo sapiens
  Table A; Target 94697; HLA-B*40:02; TUBA3C; ENSG00000198033; TAA
LATYAPVI

SEQ ID NO: 94698 - protein, 8 aa, Homo sapiens
  Table A; Target 94698; HLA-B*49:01; TUBA3C; ENSG00000198033; TAA
LATYAPVI

SEQ ID NO: 94699 - protein, 8 aa, Homo sapiens
  Table A; Target 94699; HLA-B*51:01; TUBA3C; ENSG00000198033; TAA
LATYAPVI

SEQ ID NO: 94700 - protein, 8 aa, Homo sapiens
  Table A; Target 94700; HLA-B*54:01; TUBA3C; ENSG00000198033; TAA
LATYAPVI

SEQ ID NO: 94701 - protein, 8 aa, Homo sapiens
  Table A; Target 94701; HLA-B*58:01; TUBA3C; ENSG00000198033; TAA
LATYAPVI

SEQ ID NO: 94702 - protein, 8 aa, Homo sapiens
  Table A; Target 94702; HLA-C*02:02; TUBA3C; ENSG00000198033; TAA
LATYAPVI

SEQ ID NO: 94703 - protein, 8 aa, Homo sapiens
  Table A; Target 94703; HLA-C*03:03; TUBA3C; ENSG00000198033; TAA
LATYAPVI

SEQ ID NO: 94704 - protein, 8 aa, Homo sapiens
  Table A; Target 94704; HLA-C*03:04; TUBA3C; ENSG00000198033; TAA
LATYAPVI

SEQ ID NO: 94705 - protein, 8 aa, Homo sapiens
  Table A; Target 94705; HLA-C*04:01; TUBA3C; ENSG00000198033; TAA
LATYAPVI

SEQ ID NO: 94706 - protein, 8 aa, Homo sapiens
  Table A; Target 94706; HLA-C*06:02; TUBA3C; ENSG00000198033; TAA
LATYAPVI

SEQ ID NO: 94707 - protein, 8 aa, Homo sapiens
  Table A; Target 94707; HLA-C*07:01; TUBA3C; ENSG00000198033; TAA
LATYAPVI

SEQ ID NO: 94708 - protein, 8 aa, Homo sapiens
  Table A; Target 94708; HLA-C*07:02; TUBA3C; ENSG00000198033; TAA
LATYAPVI

SEQ ID NO: 94709 - protein, 8 aa, Homo sapiens
  Table A; Target 94709; HLA-C*07:04; TUBA3C; ENSG00000198033; TAA
LATYAPVI

SEQ ID NO: 94710 - protein, 8 aa, Homo sapiens
  Table A; Target 94710; HLA-C*12:03; TUBA3C; ENSG00000198033; TAA
LATYAPVI

SEQ ID NO: 94711 - protein, 8 aa, Homo sapiens
  Table A; Target 94711; HLA-C*16:01; TUBA3C; ENSG00000198033; TAA
LATYAPVI

SEQ ID NO: 94712 - protein, 8 aa, Homo sapiens
  Table A; Target 94712; HLA-C*16:02; TUBA3C; ENSG00000198033; TAA
LATYAPVI

SEQ ID NO: 94713 - protein, 8 aa, Homo sapiens
  Table A; Target 94713; HLA-C*16:04; TUBA3C; ENSG00000198033; TAA
LATYAPVI

SEQ ID NO: 94714 - protein, 10 aa, Homo sapiens
  Table A; Target 94714; HLA-B*07:02; TUBA3C; ENSG00000198033; TAA
LATYAPVISA

SEQ ID NO: 94715 - protein, 10 aa, Homo sapiens
  Table A; Target 94715; HLA-B*54:01; TUBA3C; ENSG00000198033; TAA
LATYAPVISA

SEQ ID NO: 94716 - protein, 10 aa, Homo sapiens
  Table A; Target 94716; HLA-B*56:01; TUBA3C; ENSG00000198033; TAA
LATYAPVISA

SEQ ID NO: 94717 - protein, 9 aa, Homo sapiens
  Table A; Target 94717; HLA-C*06:02; TUBA3C; ENSG00000198033; TAA
LCTGLQGFL

SEQ ID NO: 94718 - protein, 9 aa, Homo sapiens
  Table A; Target 94718; HLA-C*07:01; TUBA3C; ENSG00000198033; TAA
LCTGLQGFL

SEQ ID NO: 94719 - protein, 10 aa, Homo sapiens
  Table A; Target 94719; HLA-C*07:01; TUBA3C; ENSG00000198033; TAA
LCTGLQGFLI

SEQ ID NO: 94720 - protein, 9 aa, Homo sapiens
  Table A; Target 94720; HLA-A*29:02; TUBA3C; ENSG00000198033; TAA
LDHKFDLMY

SEQ ID NO: 94721 - protein, 9 aa, Homo sapiens
  Table A; Target 94721; HLA-C*04:01; TUBA3C; ENSG00000198033; TAA
LDHKFDLMY

SEQ ID NO: 94722 - protein, 9 aa, Homo sapiens
  Table A; Target 94722; HLA-C*06:02; TUBA3C; ENSG00000198033; TAA
LDHKFDLMY

SEQ ID NO: 94723 - protein, 9 aa, Homo sapiens
  Table A; Target 94723; HLA-C*07:01; TUBA3C; ENSG00000198033; TAA
LDHKFDLMY

SEQ ID NO: 94724 - protein, 8 aa, Homo sapiens
  Table A; Target 94724; HLA-A*25:01; TUBA3C; ENSG00000198033; TAA
LDIERPTY

SEQ ID NO: 94725 - protein, 8 aa, Homo sapiens
  Table A; Target 94725; HLA-A*30:01; TUBA3C; ENSG00000198033; TAA
LDIERPTY

SEQ ID NO: 94726 - protein, 8 aa, Homo sapiens
  Table A; Target 94726; HLA-A*32:01; TUBA3C; ENSG00000198033; TAA
LDIERPTY

SEQ ID NO: 94727 - protein, 8 aa, Homo sapiens
  Table A; Target 94727; HLA-B*07:02; TUBA3C; ENSG00000198033; TAA
LDIERPTY

SEQ ID NO: 94728 - protein, 8 aa, Homo sapiens
  Table A; Target 94728; HLA-B*08:01; TUBA3C; ENSG00000198033; TAA
LDIERPTY

SEQ ID NO: 94729 - protein, 8 aa, Homo sapiens
  Table A; Target 94729; HLA-B*15:01; TUBA3C; ENSG00000198033; TAA
LDIERPTY

SEQ ID NO: 94730 - protein, 8 aa, Homo sapiens
  Table A; Target 94730; HLA-B*15:03; TUBA3C; ENSG00000198033; TAA
LDIERPTY

SEQ ID NO: 94731 - protein, 8 aa, Homo sapiens
  Table A; Target 94731; HLA-B*18:01; TUBA3C; ENSG00000198033; TAA
LDIERPTY

SEQ ID NO: 94732 - protein, 8 aa, Homo sapiens
  Table A; Target 94732; HLA-B*27:02; TUBA3C; ENSG00000198033; TAA
LDIERPTY

SEQ ID NO: 94733 - protein, 8 aa, Homo sapiens
  Table A; Target 94733; HLA-B*27:05; TUBA3C; ENSG00000198033; TAA
LDIERPTY

SEQ ID NO: 94734 - protein, 8 aa, Homo sapiens
  Table A; Target 94734; HLA-B*37:01; TUBA3C; ENSG00000198033; TAA
LDIERPTY

SEQ ID NO: 94735 - protein, 8 aa, Homo sapiens
  Table A; Target 94735; HLA-B*39:01; TUBA3C; ENSG00000198033; TAA
LDIERPTY

SEQ ID NO: 94736 - protein, 8 aa, Homo sapiens
  Table A; Target 94736; HLA-B*40:02; TUBA3C; ENSG00000198033; TAA
LDIERPTY

SEQ ID NO: 94737 - protein, 8 aa, Homo sapiens
  Table A; Target 94737; HLA-B*44:02; TUBA3C; ENSG00000198033; TAA
LDIERPTY

SEQ ID NO: 94738 - protein, 8 aa, Homo sapiens
  Table A; Target 94738; HLA-B*44:03; TUBA3C; ENSG00000198033; TAA
LDIERPTY

SEQ ID NO: 94739 - protein, 8 aa, Homo sapiens
  Table A; Target 94739; HLA-B*57:01; TUBA3C; ENSG00000198033; TAA
LDIERPTY

SEQ ID NO: 94740 - protein, 8 aa, Homo sapiens
  Table A; Target 94740; HLA-B*58:01; TUBA3C; ENSG00000198033; TAA
LDIERPTY

SEQ ID NO: 94741 - protein, 8 aa, Homo sapiens
  Table A; Target 94741; HLA-C*04:01; TUBA3C; ENSG00000198033; TAA
LDIERPTY

SEQ ID NO: 94742 - protein, 8 aa, Homo sapiens
  Table A; Target 94742; HLA-C*06:02; TUBA3C; ENSG00000198033; TAA
LDIERPTY

SEQ ID NO: 94743 - protein, 8 aa, Homo sapiens
  Table A; Target 94743; HLA-C*07:01; TUBA3C; ENSG00000198033; TAA
LDIERPTY

SEQ ID NO: 94744 - protein, 8 aa, Homo sapiens
  Table A; Target 94744; HLA-C*07:02; TUBA3C; ENSG00000198033; TAA
LDIERPTY

SEQ ID NO: 94745 - protein, 8 aa, Homo sapiens
  Table A; Target 94745; HLA-C*07:04; TUBA3C; ENSG00000198033; TAA
LDIERPTY

SEQ ID NO: 94746 - protein, 8 aa, Homo sapiens
  Table A; Target 94746; HLA-C*12:03; TUBA3C; ENSG00000198033; TAA
LDIERPTY

SEQ ID NO: 94747 - protein, 8 aa, Homo sapiens
  Table A; Target 94747; HLA-C*14:02; TUBA3C; ENSG00000198033; TAA
LDIERPTY

SEQ ID NO: 94748 - protein, 8 aa, Homo sapiens
  Table A; Target 94748; HLA-C*16:01; TUBA3C; ENSG00000198033; TAA
LDIERPTY

SEQ ID NO: 94749 - protein, 8 aa, Homo sapiens
  Table A; Target 94749; HLA-C*16:02; TUBA3C; ENSG00000198033; TAA
LDIERPTY

SEQ ID NO: 94750 - protein, 8 aa, Homo sapiens
  Table A; Target 94750; HLA-C*16:04; TUBA3C; ENSG00000198033; TAA
LDIERPTY

SEQ ID NO: 94751 - protein, 9 aa, Homo sapiens
  Table A; Target 94751; HLA-A*02:03; TUBA3C; ENSG00000198033; TAA
LDIERPTYT

SEQ ID NO: 94752 - protein, 9 aa, Homo sapiens
  Table A; Target 94752; HLA-B*37:01; TUBA3C; ENSG00000198033; TAA
LDIERPTYT

SEQ ID NO: 94753 - protein, 9 aa, Homo sapiens
  Table A; Target 94753; HLA-B*40:02; TUBA3C; ENSG00000198033; TAA
LDIERPTYT

SEQ ID NO: 94754 - protein, 9 aa, Homo sapiens
  Table A; Target 94754; HLA-B*49:01; TUBA3C; ENSG00000198033; TAA
LDIERPTYT

SEQ ID NO: 94755 - protein, 9 aa, Homo sapiens
  Table A; Target 94755; HLA-C*04:01; TUBA3C; ENSG00000198033; TAA
LDIERPTYT

SEQ ID NO: 94756 - protein, 9 aa, Homo sapiens
  Table A; Target 94756; HLA-C*07:01; TUBA3C; ENSG00000198033; TAA
LDIERPTYT

SEQ ID NO: 94757 - protein, 11 aa, Homo sapiens
  Table A; Target 94757; HLA-B*40:02; TUBA3C; ENSG00000198033; TAA
LDIERPTYTNL

SEQ ID NO: 94758 - protein, 8 aa, Homo sapiens
  Table A; Target 94758; HLA-B*18:01; TUBA3C; ENSG00000198033; TAA
LEFAIYPA

SEQ ID NO: 94759 - protein, 8 aa, Homo sapiens
  Table A; Target 94759; HLA-B*49:01; TUBA3C; ENSG00000198033; TAA
LEFAIYPA

SEQ ID NO: 94760 - protein, 8 aa, Homo sapiens
  Table A; Target 94760; HLA-B*54:01; TUBA3C; ENSG00000198033; TAA
LEFAIYPA

SEQ ID NO: 94761 - protein, 9 aa, Homo sapiens
  Table A; Target 94761; HLA-A*30:01; TUBA3C; ENSG00000198033; TAA
LEFAIYPAP

SEQ ID NO: 94762 - protein, 9 aa, Homo sapiens
  Table A; Target 94762; HLA-B*18:01; TUBA3C; ENSG00000198033; TAA
LEFAIYPAP

SEQ ID NO: 94763 - protein, 9 aa, Homo sapiens
  Table A; Target 94763; HLA-B*27:05; TUBA3C; ENSG00000198033; TAA
LEFAIYPAP

SEQ ID NO: 94764 - protein, 9 aa, Homo sapiens
  Table A; Target 94764; HLA-B*40:02; TUBA3C; ENSG00000198033; TAA
LEFAIYPAP

SEQ ID NO: 94765 - protein, 9 aa, Homo sapiens
  Table A; Target 94765; HLA-B*49:01; TUBA3C; ENSG00000198033; TAA
LEFAIYPAP

SEQ ID NO: 94766 - protein, 9 aa, Homo sapiens
  Table A; Target 94766; HLA-B*54:01; TUBA3C; ENSG00000198033; TAA
LEFAIYPAP

SEQ ID NO: 94767 - protein, 9 aa, Homo sapiens
  Table A; Target 94767; HLA-C*06:02; TUBA3C; ENSG00000198033; TAA
LEFAIYPAP

SEQ ID NO: 94768 - protein, 9 aa, Homo sapiens
  Table A; Target 94768; HLA-C*16:04; TUBA3C; ENSG00000198033; TAA
LEFAIYPAP

SEQ ID NO: 94769 - protein, 10 aa, Homo sapiens
  Table A; Target 94769; HLA-A*68:02; TUBA3C; ENSG00000198033; TAA
LEFAIYPAPQ

SEQ ID NO: 94770 - protein, 10 aa, Homo sapiens
  Table A; Target 94770; HLA-B*40:02; TUBA3C; ENSG00000198033; TAA
LEFAIYPAPQ

SEQ ID NO: 94771 - protein, 10 aa, Homo sapiens
  Table A; Target 94771; HLA-C*04:01; TUBA3C; ENSG00000198033; TAA
LEFAIYPAPQ

SEQ ID NO: 94772 - protein, 10 aa, Homo sapiens
  Table A; Target 94772; HLA-C*06:02; TUBA3C; ENSG00000198033; TAA
LEFAIYPAPQ

SEQ ID NO: 94773 - protein, 10 aa, Homo sapiens
  Table A; Target 94773; HLA-C*07:01; TUBA3C; ENSG00000198033; TAA
LEFAIYPAPQ

SEQ ID NO: 94774 - protein, 11 aa, Homo sapiens
  Table A; Target 94774; HLA-A*68:02; TUBA3C; ENSG00000198033; TAA
LEFAIYPAPQV

SEQ ID NO: 94775 - protein, 11 aa, Homo sapiens
  Table A; Target 94775; HLA-B*49:01; TUBA3C; ENSG00000198033; TAA
LEFAIYPAPQV

SEQ ID NO: 94776 - protein, 9 aa, Homo sapiens
  Table A; Target 94776; HLA-B*40:02; TUBA3C; ENSG00000198033; TAA
LEHGIQPDG

SEQ ID NO: 94777 - protein, 9 aa, Homo sapiens
  Table A; Target 94777; HLA-C*04:01; TUBA3C; ENSG00000198033; TAA
LEHGIQPDG

SEQ ID NO: 94778 - protein, 9 aa, Homo sapiens
  Table A; Target 94778; HLA-C*06:02; TUBA3C; ENSG00000198033; TAA
LEHGIQPDG

SEQ ID NO: 94779 - protein, 9 aa, Homo sapiens
  Table A; Target 94779; HLA-C*07:01; TUBA3C; ENSG00000198033; TAA
LEHGIQPDG

SEQ ID NO: 94780 - protein, 9 aa, Homo sapiens
  Table A; Target 94780; HLA-C*12:03; TUBA3C; ENSG00000198033; TAA
LEHGIQPDG

SEQ ID NO: 94781 - protein, 9 aa, Homo sapiens
  Table A; Target 94781; HLA-C*16:04; TUBA3C; ENSG00000198033; TAA
LEHGIQPDG

SEQ ID NO: 94782 - protein, 10 aa, Homo sapiens
  Table A; Target 94782; HLA-C*07:01; TUBA3C; ENSG00000198033; TAA
LEHGIQPDGQ

SEQ ID NO: 94783 - protein, 11 aa, Homo sapiens
  Table A; Target 94783; HLA-A*30:01; TUBA3C; ENSG00000198033; TAA
LEHGIQPDGQM

SEQ ID NO: 94784 - protein, 11 aa, Homo sapiens
  Table A; Target 94784; HLA-B*40:01; TUBA3C; ENSG00000198033; TAA
LEHGIQPDGQM

SEQ ID NO: 94785 - protein, 11 aa, Homo sapiens
  Table A; Target 94785; HLA-B*40:02; TUBA3C; ENSG00000198033; TAA
LEHGIQPDGQM

SEQ ID NO: 94786 - protein, 8 aa, Homo sapiens
  Table A; Target 94786; HLA-B*18:01; TUBA3C; ENSG00000198033; TAA
LEHSDCAF

SEQ ID NO: 94787 - protein, 8 aa, Homo sapiens
  Table A; Target 94787; HLA-B*37:01; TUBA3C; ENSG00000198033; TAA
LEHSDCAF

SEQ ID NO: 94788 - protein, 8 aa, Homo sapiens
  Table A; Target 94788; HLA-B*40:02; TUBA3C; ENSG00000198033; TAA
LEHSDCAF

SEQ ID NO: 94789 - protein, 9 aa, Homo sapiens
  Table A; Target 94789; HLA-B*40:01; TUBA3C; ENSG00000198033; TAA
LEHSDCAFM

SEQ ID NO: 94790 - protein, 9 aa, Homo sapiens
  Table A; Target 94790; HLA-B*40:02; TUBA3C; ENSG00000198033; TAA
LEHSDCAFM

SEQ ID NO: 94791 - protein, 9 aa, Homo sapiens
  Table A; Target 94791; HLA-B*49:01; TUBA3C; ENSG00000198033; TAA
LEHSDCAFM

SEQ ID NO: 94792 - protein, 9 aa, Homo sapiens
  Table A; Target 94792; HLA-C*07:01; TUBA3C; ENSG00000198033; TAA
LEHSDCAFM

SEQ ID NO: 94793 - protein, 8 aa, Homo sapiens
  Table A; Target 94793; HLA-B*18:01; TUBA3C; ENSG00000198033; TAA
LEKDYEEV

SEQ ID NO: 94794 - protein, 8 aa, Homo sapiens
  Table A; Target 94794; HLA-B*40:02; TUBA3C; ENSG00000198033; TAA
LEKDYEEV

SEQ ID NO: 94795 - protein, 8 aa, Homo sapiens
  Table A; Target 94795; HLA-B*49:01; TUBA3C; ENSG00000198033; TAA
LEKDYEEV

SEQ ID NO: 94796 - protein, 8 aa, Homo sapiens
  Table A; Target 94796; HLA-C*07:01; TUBA3C; ENSG00000198033; TAA
LEKDYEEV

SEQ ID NO: 94797 - protein, 8 aa, Homo sapiens
  Table A; Target 94797; HLA-C*12:03; TUBA3C; ENSG00000198033; TAA
LEKDYEEV

SEQ ID NO: 94798 - protein, 9 aa, Homo sapiens
  Table A; Target 94798; HLA-B*40:02; TUBA3C; ENSG00000198033; TAA
LEKDYEEVG

SEQ ID NO: 94799 - protein, 10 aa, Homo sapiens
  Table A; Target 94799; HLA-A*30:01; TUBA3C; ENSG00000198033; TAA
LEKDYEEVGV

SEQ ID NO: 94800 - protein, 10 aa, Homo sapiens
  Table A; Target 94800; HLA-B*40:01; TUBA3C; ENSG00000198033; TAA
LEKDYEEVGV

SEQ ID NO: 94801 - protein, 10 aa, Homo sapiens
  Table A; Target 94801; HLA-B*40:02; TUBA3C; ENSG00000198033; TAA
LEKDYEEVGV

SEQ ID NO: 94802 - protein, 10 aa, Homo sapiens
  Table A; Target 94802; HLA-B*49:01; TUBA3C; ENSG00000198033; TAA
LEKDYEEVGV

SEQ ID NO: 94803 - protein, 10 aa, Homo sapiens
  Table A; Target 94803; HLA-C*06:02; TUBA3C; ENSG00000198033; TAA
LEKDYEEVGV

SEQ ID NO: 94804 - protein, 9 aa, Homo sapiens
  Table A; Target 94804; HLA-A*02:01; TUBA3C; ENSG00000198033; TAA
LEPTVVDEV

SEQ ID NO: 94805 - protein, 9 aa, Homo sapiens
  Table A; Target 94805; HLA-A*02:07; TUBA3C; ENSG00000198033; TAA
LEPTVVDEV

SEQ ID NO: 94806 - protein, 9 aa, Homo sapiens
  Table A; Target 94806; HLA-A*26:01; TUBA3C; ENSG00000198033; TAA
LEPTVVDEV

SEQ ID NO: 94807 - protein, 9 aa, Homo sapiens
  Table A; Target 94807; HLA-A*30:01; TUBA3C; ENSG00000198033; TAA
LEPTVVDEV

SEQ ID NO: 94808 - protein, 9 aa, Homo sapiens
  Table A; Target 94808; HLA-A*68:02; TUBA3C; ENSG00000198033; TAA
LEPTVVDEV

SEQ ID NO: 94809 - protein, 9 aa, Homo sapiens
  Table A; Target 94809; HLA-B*13:02; TUBA3C; ENSG00000198033; TAA
LEPTVVDEV

SEQ ID NO: 94810 - protein, 9 aa, Homo sapiens
  Table A; Target 94810; HLA-B*27:05; TUBA3C; ENSG00000198033; TAA
LEPTVVDEV

SEQ ID NO: 94811 - protein, 9 aa, Homo sapiens
  Table A; Target 94811; HLA-B*37:01; TUBA3C; ENSG00000198033; TAA
LEPTVVDEV

SEQ ID NO: 94812 - protein, 9 aa, Homo sapiens
  Table A; Target 94812; HLA-B*40:01; TUBA3C; ENSG00000198033; TAA
LEPTVVDEV

SEQ ID NO: 94813 - protein, 9 aa, Homo sapiens
  Table A; Target 94813; HLA-B*40:02; TUBA3C; ENSG00000198033; TAA
LEPTVVDEV

SEQ ID NO: 94814 - protein, 9 aa, Homo sapiens
  Table A; Target 94814; HLA-B*49:01; TUBA3C; ENSG00000198033; TAA
LEPTVVDEV

SEQ ID NO: 94815 - protein, 9 aa, Homo sapiens
  Table A; Target 94815; HLA-B*55:01; TUBA3C; ENSG00000198033; TAA
LEPTVVDEV

SEQ ID NO: 94816 - protein, 9 aa, Homo sapiens
  Table A; Target 94816; HLA-C*04:01; TUBA3C; ENSG00000198033; TAA
LEPTVVDEV

SEQ ID NO: 94817 - protein, 9 aa, Homo sapiens
  Table A; Target 94817; HLA-C*06:02; TUBA3C; ENSG00000198033; TAA
LEPTVVDEV

SEQ ID NO: 94818 - protein, 9 aa, Homo sapiens
  Table A; Target 94818; HLA-C*07:01; TUBA3C; ENSG00000198033; TAA
LEPTVVDEV

SEQ ID NO: 94819 - protein, 9 aa, Homo sapiens
  Table A; Target 94819; HLA-C*07:02; TUBA3C; ENSG00000198033; TAA
LEPTVVDEV

SEQ ID NO: 94820 - protein, 9 aa, Homo sapiens
  Table A; Target 94820; HLA-C*07:04; TUBA3C; ENSG00000198033; TAA
LEPTVVDEV

SEQ ID NO: 94821 - protein, 9 aa, Homo sapiens
  Table A; Target 94821; HLA-C*12:03; TUBA3C; ENSG00000198033; TAA
LEPTVVDEV

SEQ ID NO: 94822 - protein, 10 aa, Homo sapiens
  Table A; Target 94822; HLA-A*68:02; TUBA3C; ENSG00000198033; TAA
LEPTVVDEVR

SEQ ID NO: 94823 - protein, 10 aa, Homo sapiens
  Table A; Target 94823; HLA-B*27:02; TUBA3C; ENSG00000198033; TAA
LEPTVVDEVR

SEQ ID NO: 94824 - protein, 8 aa, Homo sapiens
  Table A; Target 94824; HLA-C*07:01; TUBA3C; ENSG00000198033; TAA
LFHPEQLI

SEQ ID NO: 94825 - protein, 10 aa, Homo sapiens
  Table A; Target 94825; HLA-C*04:01; TUBA3C; ENSG00000198033; TAA
LFHPEQLITG

SEQ ID NO: 94826 - protein, 11 aa, Homo sapiens
  Table A; Target 94826; HLA-A*31:01; TUBA3C; ENSG00000198033; TAA
LFHPEQLITGK

SEQ ID NO: 94827 - protein, 9 aa, Homo sapiens
  Table A; Target 94827; HLA-A*02:01; TUBA3C; ENSG00000198033; TAA
LIGQIVSSI

SEQ ID NO: 94828 - protein, 9 aa, Homo sapiens
  Table A; Target 94828; HLA-A*02:03; TUBA3C; ENSG00000198033; TAA
LIGQIVSSI

SEQ ID NO: 94829 - protein, 9 aa, Homo sapiens
  Table A; Target 94829; HLA-A*02:04; TUBA3C; ENSG00000198033; TAA
LIGQIVSSI

SEQ ID NO: 94830 - protein, 9 aa, Homo sapiens
  Table A; Target 94830; HLA-A*02:07; TUBA3C; ENSG00000198033; TAA
LIGQIVSSI

SEQ ID NO: 94831 - protein, 9 aa, Homo sapiens
  Table A; Target 94831; HLA-A*23:01; TUBA3C; ENSG00000198033; TAA
LIGQIVSSI

SEQ ID NO: 94832 - protein, 9 aa, Homo sapiens
  Table A; Target 94832; HLA-A*24:02; TUBA3C; ENSG00000198033; TAA
LIGQIVSSI

SEQ ID NO: 94833 - protein, 9 aa, Homo sapiens
  Table A; Target 94833; HLA-A*25:01; TUBA3C; ENSG00000198033; TAA
LIGQIVSSI

SEQ ID NO: 94834 - protein, 9 aa, Homo sapiens
  Table A; Target 94834; HLA-A*30:01; TUBA3C; ENSG00000198033; TAA
LIGQIVSSI

SEQ ID NO: 94835 - protein, 9 aa, Homo sapiens
  Table A; Target 94835; HLA-A*32:01; TUBA3C; ENSG00000198033; TAA
LIGQIVSSI

SEQ ID NO: 94836 - protein, 9 aa, Homo sapiens
  Table A; Target 94836; HLA-A*68:02; TUBA3C; ENSG00000198033; TAA
LIGQIVSSI

SEQ ID NO: 94837 - protein, 9 aa, Homo sapiens
  Table A; Target 94837; HLA-B*07:02; TUBA3C; ENSG00000198033; TAA
LIGQIVSSI

SEQ ID NO: 94838 - protein, 9 aa, Homo sapiens
  Table A; Target 94838; HLA-B*13:02; TUBA3C; ENSG00000198033; TAA
LIGQIVSSI

SEQ ID NO: 94839 - protein, 9 aa, Homo sapiens
  Table A; Target 94839; HLA-B*27:05; TUBA3C; ENSG00000198033; TAA
LIGQIVSSI

SEQ ID NO: 94840 - protein, 9 aa, Homo sapiens
  Table A; Target 94840; HLA-B*38:01; TUBA3C; ENSG00000198033; TAA
LIGQIVSSI

SEQ ID NO: 94841 - protein, 9 aa, Homo sapiens
  Table A; Target 94841; HLA-B*39:01; TUBA3C; ENSG00000198033; TAA
LIGQIVSSI

SEQ ID NO: 94842 - protein, 9 aa, Homo sapiens
  Table A; Target 94842; HLA-B*40:02; TUBA3C; ENSG00000198033; TAA
LIGQIVSSI

SEQ ID NO: 94843 - protein, 9 aa, Homo sapiens
  Table A; Target 94843; HLA-B*46:01; TUBA3C; ENSG00000198033; TAA
LIGQIVSSI

SEQ ID NO: 94844 - protein, 9 aa, Homo sapiens
  Table A; Target 94844; HLA-B*49:01; TUBA3C; ENSG00000198033; TAA
LIGQIVSSI

SEQ ID NO: 94845 - protein, 9 aa, Homo sapiens
  Table A; Target 94845; HLA-B*51:01; TUBA3C; ENSG00000198033; TAA
LIGQIVSSI

SEQ ID NO: 94846 - protein, 9 aa, Homo sapiens
  Table A; Target 94846; HLA-B*58:01; TUBA3C; ENSG00000198033; TAA
LIGQIVSSI

SEQ ID NO: 94847 - protein, 9 aa, Homo sapiens
  Table A; Target 94847; HLA-C*01:02; TUBA3C; ENSG00000198033; TAA
LIGQIVSSI

SEQ ID NO: 94848 - protein, 9 aa, Homo sapiens
  Table A; Target 94848; HLA-C*04:01; TUBA3C; ENSG00000198033; TAA
LIGQIVSSI

SEQ ID NO: 94849 - protein, 9 aa, Homo sapiens
  Table A; Target 94849; HLA-C*06:02; TUBA3C; ENSG00000198033; TAA
LIGQIVSSI

SEQ ID NO: 94850 - protein, 9 aa, Homo sapiens
  Table A; Target 94850; HLA-C*07:01; TUBA3C; ENSG00000198033; TAA
LIGQIVSSI

SEQ ID NO: 94851 - protein, 9 aa, Homo sapiens
  Table A; Target 94851; HLA-C*07:02; TUBA3C; ENSG00000198033; TAA
LIGQIVSSI

SEQ ID NO: 94852 - protein, 9 aa, Homo sapiens
  Table A; Target 94852; HLA-C*07:04; TUBA3C; ENSG00000198033; TAA
LIGQIVSSI

SEQ ID NO: 94853 - protein, 9 aa, Homo sapiens
  Table A; Target 94853; HLA-C*12:03; TUBA3C; ENSG00000198033; TAA
LIGQIVSSI

SEQ ID NO: 94854 - protein, 9 aa, Homo sapiens
  Table A; Target 94854; HLA-C*14:02; TUBA3C; ENSG00000198033; TAA
LIGQIVSSI

SEQ ID NO: 94855 - protein, 8 aa, Homo sapiens
  Table A; Target 94855; HLA-B*08:01; TUBA3C; ENSG00000198033; TAA
LLMERLSV

SEQ ID NO: 94856 - protein, 10 aa, Homo sapiens
  Table A; Target 94856; HLA-A*01:01; TUBA3C; ENSG00000198033; TAA
LLMERLSVDY

SEQ ID NO: 94857 - protein, 10 aa, Homo sapiens
  Table A; Target 94857; HLA-A*26:01; TUBA3C; ENSG00000198033; TAA
LLMERLSVDY

SEQ ID NO: 94858 - protein, 10 aa, Homo sapiens
  Table A; Target 94858; HLA-A*29:02; TUBA3C; ENSG00000198033; TAA
LLMERLSVDY

SEQ ID NO: 94859 - protein, 10 aa, Homo sapiens
  Table A; Target 94859; HLA-A*30:02; TUBA3C; ENSG00000198033; TAA
LLMERLSVDY

SEQ ID NO: 94860 - protein, 10 aa, Homo sapiens
  Table A; Target 94860; HLA-B*15:01; TUBA3C; ENSG00000198033; TAA
LLMERLSVDY

SEQ ID NO: 94861 - protein, 10 aa, Homo sapiens
  Table A; Target 94861; HLA-B*15:03; TUBA3C; ENSG00000198033; TAA
LLMERLSVDY

SEQ ID NO: 94862 - protein, 10 aa, Homo sapiens
  Table A; Target 94862; HLA-B*46:01; TUBA3C; ENSG00000198033; TAA
LLMERLSVDY

SEQ ID NO: 94863 - protein, 10 aa, Homo sapiens
  Table A; Target 94863; HLA-C*02:02; TUBA3C; ENSG00000198033; TAA
LLMERLSVDY

SEQ ID NO: 94864 - protein, 10 aa, Homo sapiens
  Table A; Target 94864; HLA-C*04:01; TUBA3C; ENSG00000198033; TAA
LLMERLSVDY

SEQ ID NO: 94865 - protein, 10 aa, Homo sapiens
  Table A; Target 94865; HLA-C*07:01; TUBA3C; ENSG00000198033; TAA
LLMERLSVDY

SEQ ID NO: 94866 - protein, 9 aa, Homo sapiens
  Table A; Target 94866; HLA-A*01:01; TUBA3C; ENSG00000198033; TAA
LMERLSVDY

SEQ ID NO: 94867 - protein, 9 aa, Homo sapiens
  Table A; Target 94867; HLA-A*29:02; TUBA3C; ENSG00000198033; TAA
LMERLSVDY

SEQ ID NO: 94868 - protein, 9 aa, Homo sapiens
  Table A; Target 94868; HLA-A*30:02; TUBA3C; ENSG00000198033; TAA
LMERLSVDY

SEQ ID NO: 94869 - protein, 9 aa, Homo sapiens
  Table A; Target 94869; HLA-B*15:01; TUBA3C; ENSG00000198033; TAA
LMERLSVDY

SEQ ID NO: 94870 - protein, 9 aa, Homo sapiens
  Table A; Target 94870; HLA-B*15:03; TUBA3C; ENSG00000198033; TAA
LMERLSVDY

SEQ ID NO: 94871 - protein, 9 aa, Homo sapiens
  Table A; Target 94871; HLA-B*18:01; TUBA3C; ENSG00000198033; TAA
LMERLSVDY

SEQ ID NO: 94872 - protein, 9 aa, Homo sapiens
  Table A; Target 94872; HLA-B*35:01; TUBA3C; ENSG00000198033; TAA
LMERLSVDY

SEQ ID NO: 94873 - protein, 9 aa, Homo sapiens
  Table A; Target 94873; HLA-B*46:01; TUBA3C; ENSG00000198033; TAA
LMERLSVDY

SEQ ID NO: 94874 - protein, 9 aa, Homo sapiens
  Table A; Target 94874; HLA-B*55:01; TUBA3C; ENSG00000198033; TAA
LMERLSVDY

SEQ ID NO: 94875 - protein, 9 aa, Homo sapiens
  Table A; Target 94875; HLA-C*03:03; TUBA3C; ENSG00000198033; TAA
LMERLSVDY

SEQ ID NO: 94876 - protein, 9 aa, Homo sapiens
  Table A; Target 94876; HLA-C*04:01; TUBA3C; ENSG00000198033; TAA
LMERLSVDY

SEQ ID NO: 94877 - protein, 9 aa, Homo sapiens
  Table A; Target 94877; HLA-C*07:01; TUBA3C; ENSG00000198033; TAA
LMERLSVDY

SEQ ID NO: 94878 - protein, 9 aa, Homo sapiens
  Table A; Target 94878; HLA-C*07:04; TUBA3C; ENSG00000198033; TAA
LMERLSVDY

SEQ ID NO: 94879 - protein, 9 aa, Homo sapiens
  Table A; Target 94879; HLA-C*12:03; TUBA3C; ENSG00000198033; TAA
LMERLSVDY

SEQ ID NO: 94880 - protein, 8 aa, Homo sapiens
  Table A; Target 94880; HLA-B*08:01; TUBA3C; ENSG00000198033; TAA
LMYAKRAF

SEQ ID NO: 94881 - protein, 9 aa, Homo sapiens
  Table A; Target 94881; HLA-A*02:01; TUBA3C; ENSG00000198033; TAA
LMYAKRAFV

SEQ ID NO: 94882 - protein, 9 aa, Homo sapiens
  Table A; Target 94882; HLA-A*02:03; TUBA3C; ENSG00000198033; TAA
LMYAKRAFV

SEQ ID NO: 94883 - protein, 9 aa, Homo sapiens
  Table A; Target 94883; HLA-B*08:01; TUBA3C; ENSG00000198033; TAA
LMYAKRAFV

SEQ ID NO: 94884 - protein, 8 aa, Homo sapiens
  Table A; Target 94884; HLA-B*27:02; TUBA3C; ENSG00000198033; TAA
LNVDLTEF

SEQ ID NO: 94885 - protein, 8 aa, Homo sapiens
  Table A; Target 94885; HLA-B*46:01; TUBA3C; ENSG00000198033; TAA
LNVDLTEF

SEQ ID NO: 94886 - protein, 8 aa, Homo sapiens
  Table A; Target 94886; HLA-C*04:01; TUBA3C; ENSG00000198033; TAA
LNVDLTEF

SEQ ID NO: 94887 - protein, 8 aa, Homo sapiens
  Table A; Target 94887; HLA-C*07:01; TUBA3C; ENSG00000198033; TAA
LNVDLTEF

SEQ ID NO: 94888 - protein, 11 aa, Homo sapiens
  Table A; Target 94888; HLA-C*07:01; TUBA3C; ENSG00000198033; TAA
LNVDLTEFQTN

SEQ ID NO: 94889 - protein, 10 aa, Homo sapiens
  Table A; Target 94889; HLA-A*24:02; TUBA3C; ENSG00000198033; TAA
LQGFLIFHSF

SEQ ID NO: 94890 - protein, 9 aa, Homo sapiens
  Table A; Target 94890; HLA-A*02:01; TUBA3C; ENSG00000198033; TAA
LRFDGALNV

SEQ ID NO: 94891 - protein, 9 aa, Homo sapiens
  Table A; Target 94891; HLA-A*02:03; TUBA3C; ENSG00000198033; TAA
LRFDGALNV

SEQ ID NO: 94892 - protein, 9 aa, Homo sapiens
  Table A; Target 94892; HLA-A*02:04; TUBA3C; ENSG00000198033; TAA
LRFDGALNV

SEQ ID NO: 94893 - protein, 9 aa, Homo sapiens
  Table A; Target 94893; HLA-A*68:02; TUBA3C; ENSG00000198033; TAA
LRFDGALNV

SEQ ID NO: 94894 - protein, 9 aa, Homo sapiens
  Table A; Target 94894; HLA-B*13:02; TUBA3C; ENSG00000198033; TAA
LRFDGALNV

SEQ ID NO: 94895 - protein, 9 aa, Homo sapiens
  Table A; Target 94895; HLA-B*27:05; TUBA3C; ENSG00000198033; TAA
LRFDGALNV

SEQ ID NO: 94896 - protein, 9 aa, Homo sapiens
  Table A; Target 94896; HLA-B*38:01; TUBA3C; ENSG00000198033; TAA
LRFDGALNV

SEQ ID NO: 94897 - protein, 9 aa, Homo sapiens
  Table A; Target 94897; HLA-B*39:01; TUBA3C; ENSG00000198033; TAA
LRFDGALNV

SEQ ID NO: 94898 - protein, 9 aa, Homo sapiens
  Table A; Target 94898; HLA-B*49:01; TUBA3C; ENSG00000198033; TAA
LRFDGALNV

SEQ ID NO: 94899 - protein, 9 aa, Homo sapiens
  Table A; Target 94899; HLA-B*51:01; TUBA3C; ENSG00000198033; TAA
LRFDGALNV

SEQ ID NO: 94900 - protein, 9 aa, Homo sapiens
  Table A; Target 94900; HLA-C*02:02; TUBA3C; ENSG00000198033; TAA
LRFDGALNV

SEQ ID NO: 94901 - protein, 9 aa, Homo sapiens
  Table A; Target 94901; HLA-C*06:02; TUBA3C; ENSG00000198033; TAA
LRFDGALNV

SEQ ID NO: 94902 - protein, 9 aa, Homo sapiens
  Table A; Target 94902; HLA-C*07:01; TUBA3C; ENSG00000198033; TAA
LRFDGALNV

SEQ ID NO: 94903 - protein, 9 aa, Homo sapiens
  Table A; Target 94903; HLA-C*12:03; TUBA3C; ENSG00000198033; TAA
LRFDGALNV

SEQ ID NO: 94904 - protein, 9 aa, Homo sapiens
  Table A; Target 94904; HLA-C*16:04; TUBA3C; ENSG00000198033; TAA
LRFDGALNV

SEQ ID NO: 94905 - protein, 11 aa, Homo sapiens
  Table A; Target 94905; HLA-B*27:05; TUBA3C; ENSG00000198033; TAA
LRFDGALNVDL

SEQ ID NO: 94906 - protein, 11 aa, Homo sapiens
  Table A; Target 94906; HLA-A*32:01; TUBA3C; ENSG00000198033; TAA
LSNTTAIAEAW

SEQ ID NO: 94907 - protein, 11 aa, Homo sapiens
  Table A; Target 94907; HLA-B*07:02; TUBA3C; ENSG00000198033; TAA
LSNTTAIAEAW

SEQ ID NO: 94908 - protein, 11 aa, Homo sapiens
  Table A; Target 94908; HLA-B*27:02; TUBA3C; ENSG00000198033; TAA
LSNTTAIAEAW

SEQ ID NO: 94909 - protein, 11 aa, Homo sapiens
  Table A; Target 94909; HLA-B*57:01; TUBA3C; ENSG00000198033; TAA
LSNTTAIAEAW

SEQ ID NO: 94910 - protein, 11 aa, Homo sapiens
  Table A; Target 94910; HLA-B*58:01; TUBA3C; ENSG00000198033; TAA
LSNTTAIAEAW

SEQ ID NO: 94911 - protein, 11 aa, Homo sapiens
  Table A; Target 94911; HLA-C*04:01; TUBA3C; ENSG00000198033; TAA
LSNTTAIAEAW

SEQ ID NO: 94912 - protein, 11 aa, Homo sapiens
  Table A; Target 94912; HLA-C*07:01; TUBA3C; ENSG00000198033; TAA
LSNTTAIAEAW

SEQ ID NO: 94913 - protein, 11 aa, Homo sapiens
  Table A; Target 94913; HLA-C*16:04; TUBA3C; ENSG00000198033; TAA
LSNTTAIAEAW

SEQ ID NO: 94914 - protein, 9 aa, Homo sapiens
  Table A; Target 94914; HLA-B*54:01; TUBA3C; ENSG00000198033; TAA
LSVAEITNA

SEQ ID NO: 94915 - protein, 11 aa, Homo sapiens
  Table A; Target 94915; HLA-B*57:01; TUBA3C; ENSG00000198033; TAA
LSVAEITNACF

SEQ ID NO: 94916 - protein, 11 aa, Homo sapiens
  Table A; Target 94916; HLA-B*58:01; TUBA3C; ENSG00000198033; TAA
LSVAEITNACF

SEQ ID NO: 94917 - protein, 11 aa, Homo sapiens
  Table A; Target 94917; HLA-C*04:01; TUBA3C; ENSG00000198033; TAA
LSVAEITNACF

SEQ ID NO: 94918 - protein, 8 aa, Homo sapiens
  Table A; Target 94918; HLA-C*06:02; TUBA3C; ENSG00000198033; TAA
LSVDYGKK

SEQ ID NO: 94919 - protein, 9 aa, Homo sapiens
  Table A; Target 94919; HLA-C*06:02; TUBA3C; ENSG00000198033; TAA
LSVDYGKKS

SEQ ID NO: 94920 - protein, 10 aa, Homo sapiens
  Table A; Target 94920; HLA-C*06:02; TUBA3C; ENSG00000198033; TAA
LSVDYGKKSK

SEQ ID NO: 94921 - protein, 8 aa, Homo sapiens
  Table A; Target 94921; HLA-C*05:01; TUBA3C; ENSG00000198033; TAA
LTEFQTNL

SEQ ID NO: 94922 - protein, 9 aa, Homo sapiens
  Table A; Target 94922; HLA-A*01:01; TUBA3C; ENSG00000198033; TAA
LTEFQTNLV

SEQ ID NO: 94923 - protein, 9 aa, Homo sapiens
  Table A; Target 94923; HLA-A*68:02; TUBA3C; ENSG00000198033; TAA
LTEFQTNLV

SEQ ID NO: 94924 - protein, 11 aa, Homo sapiens
  Table A; Target 94924; HLA-A*01:01; TUBA3C; ENSG00000198033; TAA
LTEFQTNLVPY

SEQ ID NO: 94925 - protein, 11 aa, Homo sapiens
  Table A; Target 94925; HLA-C*04:01; TUBA3C; ENSG00000198033; TAA
LTEFQTNLVPY

SEQ ID NO: 94926 - protein, 11 aa, Homo sapiens
  Table A; Target 94926; HLA-C*07:01; TUBA3C; ENSG00000198033; TAA
LTEFQTNLVPY

SEQ ID NO: 94927 - protein, 9 aa, Homo sapiens
  Table A; Target 94927; HLA-A*01:01; TUBA3C; ENSG00000198033; TAA
LTTHTTLEH

SEQ ID NO: 94928 - protein, 9 aa, Homo sapiens
  Table A; Target 94928; HLA-A*03:01; TUBA3C; ENSG00000198033; TAA
LTTHTTLEH

SEQ ID NO: 94929 - protein, 9 aa, Homo sapiens
  Table A; Target 94929; HLA-A*11:01; TUBA3C; ENSG00000198033; TAA
LTTHTTLEH

SEQ ID NO: 94930 - protein, 9 aa, Homo sapiens
  Table A; Target 94930; HLA-A*29:02; TUBA3C; ENSG00000198033; TAA
LTTHTTLEH

SEQ ID NO: 94931 - protein, 9 aa, Homo sapiens
  Table A; Target 94931; HLA-B*27:05; TUBA3C; ENSG00000198033; TAA
LTTHTTLEH

SEQ ID NO: 94932 - protein, 9 aa, Homo sapiens
  Table A; Target 94932; HLA-C*06:02; TUBA3C; ENSG00000198033; TAA
LTTHTTLEH

SEQ ID NO: 94933 - protein, 9 aa, Homo sapiens
  Table A; Target 94933; HLA-C*07:01; TUBA3C; ENSG00000198033; TAA
LTTHTTLEH

SEQ ID NO: 94934 - protein, 9 aa, Homo sapiens
  Table A; Target 94934; HLA-C*16:01; TUBA3C; ENSG00000198033; TAA
LTTHTTLEH

SEQ ID NO: 94935 - protein, 9 aa, Homo sapiens
  Table A; Target 94935; HLA-C*16:02; TUBA3C; ENSG00000198033; TAA
LTTHTTLEH

SEQ ID NO: 94936 - protein, 9 aa, Homo sapiens
  Table A; Target 94936; HLA-A*02:01; TUBA3C; ENSG00000198033; TAA
LVLDRIRKL

SEQ ID NO: 94937 - protein, 9 aa, Homo sapiens
  Table A; Target 94937; HLA-A*02:03; TUBA3C; ENSG00000198033; TAA
LVLDRIRKL

SEQ ID NO: 94938 - protein, 9 aa, Homo sapiens
  Table A; Target 94938; HLA-A*02:04; TUBA3C; ENSG00000198033; TAA
LVLDRIRKL

SEQ ID NO: 94939 - protein, 9 aa, Homo sapiens
  Table A; Target 94939; HLA-A*02:07; TUBA3C; ENSG00000198033; TAA
LVLDRIRKL

SEQ ID NO: 94940 - protein, 9 aa, Homo sapiens
  Table A; Target 94940; HLA-A*03:01; TUBA3C; ENSG00000198033; TAA
LVLDRIRKL

SEQ ID NO: 94941 - protein, 9 aa, Homo sapiens
  Table A; Target 94941; HLA-A*31:01; TUBA3C; ENSG00000198033; TAA
LVLDRIRKL

SEQ ID NO: 94942 - protein, 9 aa, Homo sapiens
  Table A; Target 94942; HLA-B*57:01; TUBA3C; ENSG00000198033; TAA
LVLDRIRKL

SEQ ID NO: 94943 - protein, 9 aa, Homo sapiens
  Table A; Target 94943; HLA-A*02:07; TUBA3C; ENSG00000198033; TAA
LVPYPRIHF

SEQ ID NO: 94944 - protein, 9 aa, Homo sapiens
  Table A; Target 94944; HLA-A*24:02; TUBA3C; ENSG00000198033; TAA
LVPYPRIHF

SEQ ID NO: 94945 - protein, 9 aa, Homo sapiens
  Table A; Target 94945; HLA-A*31:01; TUBA3C; ENSG00000198033; TAA
LVPYPRIHF

SEQ ID NO: 94946 - protein, 9 aa, Homo sapiens
  Table A; Target 94946; HLA-A*03:01; TUBA3C; ENSG00000198033; TAA
LYRGDVVPK

SEQ ID NO: 94947 - protein, 9 aa, Homo sapiens
  Table A; Target 94947; HLA-A*31:01; TUBA3C; ENSG00000198033; TAA
LYRGDVVPK

SEQ ID NO: 94948 - protein, 9 aa, Homo sapiens
  Table A; Target 94948; HLA-A*33:01; TUBA3C; ENSG00000198033; TAA
LYRGDVVPK

SEQ ID NO: 94949 - protein, 9 aa, Homo sapiens
  Table A; Target 94949; HLA-A*33:03; TUBA3C; ENSG00000198033; TAA
LYRGDVVPK

SEQ ID NO: 94950 - protein, 9 aa, Homo sapiens
  Table A; Target 94950; HLA-B*27:02; TUBA3C; ENSG00000198033; TAA
LYRGDVVPK

SEQ ID NO: 94951 - protein, 9 aa, Homo sapiens
  Table A; Target 94951; HLA-B*40:02; TUBA3C; ENSG00000198033; TAA
LYRGDVVPK

SEQ ID NO: 94952 - protein, 9 aa, Homo sapiens
  Table A; Target 94952; HLA-C*04:01; TUBA3C; ENSG00000198033; TAA
LYRGDVVPK

SEQ ID NO: 94953 - protein, 9 aa, Homo sapiens
  Table A; Target 94953; HLA-C*06:02; TUBA3C; ENSG00000198033; TAA
LYRGDVVPK

SEQ ID NO: 94954 - protein, 9 aa, Homo sapiens
  Table A; Target 94954; HLA-C*07:01; TUBA3C; ENSG00000198033; TAA
LYRGDVVPK

SEQ ID NO: 94955 - protein, 9 aa, Homo sapiens
  Table A; Target 94955; HLA-C*07:02; TUBA3C; ENSG00000198033; TAA
LYRGDVVPK

SEQ ID NO: 94956 - protein, 9 aa, Homo sapiens
  Table A; Target 94956; HLA-A*30:01; TUBA3C; ENSG00000198033; TAA
MEEGEFSEA

SEQ ID NO: 94957 - protein, 9 aa, Homo sapiens
  Table A; Target 94957; HLA-B*18:01; TUBA3C; ENSG00000198033; TAA
MEEGEFSEA

SEQ ID NO: 94958 - protein, 9 aa, Homo sapiens
  Table A; Target 94958; HLA-B*27:05; TUBA3C; ENSG00000198033; TAA
MEEGEFSEA

SEQ ID NO: 94959 - protein, 9 aa, Homo sapiens
  Table A; Target 94959; HLA-B*39:01; TUBA3C; ENSG00000198033; TAA
MEEGEFSEA

SEQ ID NO: 94960 - protein, 9 aa, Homo sapiens
  Table A; Target 94960; HLA-B*40:01; TUBA3C; ENSG00000198033; TAA
MEEGEFSEA

SEQ ID NO: 94961 - protein, 9 aa, Homo sapiens
  Table A; Target 94961; HLA-B*40:02; TUBA3C; ENSG00000198033; TAA
MEEGEFSEA

SEQ ID NO: 94962 - protein, 9 aa, Homo sapiens
  Table A; Target 94962; HLA-B*49:01; TUBA3C; ENSG00000198033; TAA
MEEGEFSEA

SEQ ID NO: 94963 - protein, 8 aa, Homo sapiens
  Table A; Target 94963; HLA-B*15:01; TUBA3C; ENSG00000198033; TAA
MERLSVDY

SEQ ID NO: 94964 - protein, 8 aa, Homo sapiens
  Table A; Target 94964; HLA-B*15:03; TUBA3C; ENSG00000198033; TAA
MERLSVDY

SEQ ID NO: 94965 - protein, 8 aa, Homo sapiens
  Table A; Target 94965; HLA-B*18:01; TUBA3C; ENSG00000198033; TAA
MERLSVDY

SEQ ID NO: 94966 - protein, 8 aa, Homo sapiens
  Table A; Target 94966; HLA-B*35:01; TUBA3C; ENSG00000198033; TAA
MERLSVDY

SEQ ID NO: 94967 - protein, 8 aa, Homo sapiens
  Table A; Target 94967; HLA-B*37:01; TUBA3C; ENSG00000198033; TAA
MERLSVDY

SEQ ID NO: 94968 - protein, 8 aa, Homo sapiens
  Table A; Target 94968; HLA-B*40:02; TUBA3C; ENSG00000198033; TAA
MERLSVDY

SEQ ID NO: 94969 - protein, 8 aa, Homo sapiens
  Table A; Target 94969; HLA-B*44:02; TUBA3C; ENSG00000198033; TAA
MERLSVDY

SEQ ID NO: 94970 - protein, 8 aa, Homo sapiens
  Table A; Target 94970; HLA-B*44:03; TUBA3C; ENSG00000198033; TAA
MERLSVDY

SEQ ID NO: 94971 - protein, 8 aa, Homo sapiens
  Table A; Target 94971; HLA-C*01:02; TUBA3C; ENSG00000198033; TAA
MERLSVDY

SEQ ID NO: 94972 - protein, 8 aa, Homo sapiens
  Table A; Target 94972; HLA-C*04:01; TUBA3C; ENSG00000198033; TAA
MERLSVDY

SEQ ID NO: 94973 - protein, 8 aa, Homo sapiens
  Table A; Target 94973; HLA-C*06:02; TUBA3C; ENSG00000198033; TAA
MERLSVDY

SEQ ID NO: 94974 - protein, 8 aa, Homo sapiens
  Table A; Target 94974; HLA-C*07:01; TUBA3C; ENSG00000198033; TAA
MERLSVDY

SEQ ID NO: 94975 - protein, 8 aa, Homo sapiens
  Table A; Target 94975; HLA-C*07:04; TUBA3C; ENSG00000198033; TAA
MERLSVDY

SEQ ID NO: 94976 - protein, 8 aa, Homo sapiens
  Table A; Target 94976; HLA-C*12:03; TUBA3C; ENSG00000198033; TAA
MERLSVDY

SEQ ID NO: 94977 - protein, 8 aa, Homo sapiens
  Table A; Target 94977; HLA-C*16:02; TUBA3C; ENSG00000198033; TAA
MERLSVDY

SEQ ID NO: 94978 - protein, 8 aa, Homo sapiens
  Table A; Target 94978; HLA-C*16:04; TUBA3C; ENSG00000198033; TAA
MERLSVDY

SEQ ID NO: 94979 - protein, 9 aa, Homo sapiens
  Table A; Target 94979; HLA-B*40:02; TUBA3C; ENSG00000198033; TAA
MERLSVDYG

SEQ ID NO: 94980 - protein, 8 aa, Homo sapiens
  Table A; Target 94980; HLA-A*02:03; TUBA3C; ENSG00000198033; TAA
MLSNTTAI

SEQ ID NO: 94981 - protein, 8 aa, Homo sapiens
  Table A; Target 94981; HLA-B*13:02; TUBA3C; ENSG00000198033; TAA
MLSNTTAI

SEQ ID NO: 94982 - protein, 8 aa, Homo sapiens
  Table A; Target 94982; HLA-B*37:01; TUBA3C; ENSG00000198033; TAA
MLSNTTAI

SEQ ID NO: 94983 - protein, 8 aa, Homo sapiens
  Table A; Target 94983; HLA-B*39:01; TUBA3C; ENSG00000198033; TAA
MLSNTTAI

SEQ ID NO: 94984 - protein, 8 aa, Homo sapiens
  Table A; Target 94984; HLA-C*07:04; TUBA3C; ENSG00000198033; TAA
MLSNTTAI

SEQ ID NO: 94985 - protein, 8 aa, Homo sapiens
  Table A; Target 94985; HLA-C*14:02; TUBA3C; ENSG00000198033; TAA
MLSNTTAI

SEQ ID NO: 94986 - protein, 9 aa, Homo sapiens
  Table A; Target 94986; HLA-A*02:01; TUBA3C; ENSG00000198033; TAA
MLSNTTAIA

SEQ ID NO: 94987 - protein, 9 aa, Homo sapiens
  Table A; Target 94987; HLA-A*02:03; TUBA3C; ENSG00000198033; TAA
MLSNTTAIA

SEQ ID NO: 94988 - protein, 9 aa, Homo sapiens
  Table A; Target 94988; HLA-B*54:01; TUBA3C; ENSG00000198033; TAA
MLSNTTAIA

SEQ ID NO: 94989 - protein, 9 aa, Homo sapiens
  Table A; Target 94989; HLA-C*07:04; TUBA3C; ENSG00000198033; TAA
MLSNTTAIA

SEQ ID NO: 94990 - protein, 9 aa, Homo sapiens
  Table A; Target 94990; HLA-C*14:02; TUBA3C; ENSG00000198033; TAA
MLSNTTAIA

SEQ ID NO: 94991 - protein, 10 aa, Homo sapiens
  Table A; Target 94991; HLA-B*07:02; TUBA3C; ENSG00000198033; TAA
MLSNTTAIAE

SEQ ID NO: 94992 - protein, 10 aa, Homo sapiens
  Table A; Target 94992; HLA-C*04:01; TUBA3C; ENSG00000198033; TAA
MLSNTTAIAE

SEQ ID NO: 94993 - protein, 10 aa, Homo sapiens
  Table A; Target 94993; HLA-C*07:01; TUBA3C; ENSG00000198033; TAA
MLSNTTAIAE

SEQ ID NO: 94994 - protein, 10 aa, Homo sapiens
  Table A; Target 94994; HLA-C*07:04; TUBA3C; ENSG00000198033; TAA
MLSNTTAIAE

SEQ ID NO: 94995 - protein, 11 aa, Homo sapiens
  Table A; Target 94995; HLA-A*02:01; TUBA3C; ENSG00000198033; TAA
MLSNTTAIAEA

SEQ ID NO: 94996 - protein, 11 aa, Homo sapiens
  Table A; Target 94996; HLA-A*02:03; TUBA3C; ENSG00000198033; TAA
MLSNTTAIAEA

SEQ ID NO: 94997 - protein, 11 aa, Homo sapiens
  Table A; Target 94997; HLA-B*54:01; TUBA3C; ENSG00000198033; TAA
MLSNTTAIAEA

SEQ ID NO: 94998 - protein, 11 aa, Homo sapiens
  Table A; Target 94998; HLA-C*07:04; TUBA3C; ENSG00000198033; TAA
MLSNTTAIAEA

SEQ ID NO: 94999 - protein, 8 aa, Homo sapiens
  Table A; Target 94999; HLA-B*08:01; TUBA3C; ENSG00000198033; TAA
MLYRGDVV

SEQ ID NO: 95000 - protein, 8 aa, Homo sapiens
  Table A; Target 95000; HLA-B*13:02; TUBA3C; ENSG00000198033; TAA
MLYRGDVV

SEQ ID NO: 95001 - protein, 8 aa, Homo sapiens
  Table A; Target 95001; HLA-B*40:02; TUBA3C; ENSG00000198033; TAA
MLYRGDVV

SEQ ID NO: 95002 - protein, 8 aa, Homo sapiens
  Table A; Target 95002; HLA-B*51:01; TUBA3C; ENSG00000198033; TAA
MLYRGDVV

SEQ ID NO: 95003 - protein, 8 aa, Homo sapiens
  Table A; Target 95003; HLA-B*54:01; TUBA3C; ENSG00000198033; TAA
MLYRGDVV

SEQ ID NO: 95004 - protein, 9 aa, Homo sapiens
  Table A; Target 95004; HLA-A*02:01; TUBA3C; ENSG00000198033; TAA
MLYRGDVVP

SEQ ID NO: 95005 - protein, 10 aa, Homo sapiens
  Table A; Target 95005; HLA-A*01:01; TUBA3C; ENSG00000198033; TAA
MLYRGDVVPK

SEQ ID NO: 95006 - protein, 10 aa, Homo sapiens
  Table A; Target 95006; HLA-A*02:01; TUBA3C; ENSG00000198033; TAA
MLYRGDVVPK

SEQ ID NO: 95007 - protein, 10 aa, Homo sapiens
  Table A; Target 95007; HLA-A*02:03; TUBA3C; ENSG00000198033; TAA
MLYRGDVVPK

SEQ ID NO: 95008 - protein, 10 aa, Homo sapiens
  Table A; Target 95008; HLA-A*03:01; TUBA3C; ENSG00000198033; TAA
MLYRGDVVPK

SEQ ID NO: 95009 - protein, 10 aa, Homo sapiens
  Table A; Target 95009; HLA-A*03:02; TUBA3C; ENSG00000198033; TAA
MLYRGDVVPK

SEQ ID NO: 95010 - protein, 10 aa, Homo sapiens
  Table A; Target 95010; HLA-A*11:01; TUBA3C; ENSG00000198033; TAA
MLYRGDVVPK

SEQ ID NO: 95011 - protein, 10 aa, Homo sapiens
  Table A; Target 95011; HLA-A*31:01; TUBA3C; ENSG00000198033; TAA
MLYRGDVVPK

SEQ ID NO: 95012 - protein, 10 aa, Homo sapiens
  Table A; Target 95012; HLA-A*33:01; TUBA3C; ENSG00000198033; TAA
MLYRGDVVPK

SEQ ID NO: 95013 - protein, 10 aa, Homo sapiens
  Table A; Target 95013; HLA-A*68:01; TUBA3C; ENSG00000198033; TAA
MLYRGDVVPK

SEQ ID NO: 95014 - protein, 10 aa, Homo sapiens
  Table A; Target 95014; HLA-A*68:02; TUBA3C; ENSG00000198033; TAA
MLYRGDVVPK

SEQ ID NO: 95015 - protein, 10 aa, Homo sapiens
  Table A; Target 95015; HLA-B*27:02; TUBA3C; ENSG00000198033; TAA
MLYRGDVVPK

SEQ ID NO: 95016 - protein, 10 aa, Homo sapiens
  Table A; Target 95016; HLA-B*27:05; TUBA3C; ENSG00000198033; TAA
MLYRGDVVPK

SEQ ID NO: 95017 - protein, 10 aa, Homo sapiens
  Table A; Target 95017; HLA-B*40:02; TUBA3C; ENSG00000198033; TAA
MLYRGDVVPK

SEQ ID NO: 95018 - protein, 10 aa, Homo sapiens
  Table A; Target 95018; HLA-B*54:01; TUBA3C; ENSG00000198033; TAA
MLYRGDVVPK

SEQ ID NO: 95019 - protein, 10 aa, Homo sapiens
  Table A; Target 95019; HLA-B*57:01; TUBA3C; ENSG00000198033; TAA
MLYRGDVVPK

SEQ ID NO: 95020 - protein, 10 aa, Homo sapiens
  Table A; Target 95020; HLA-C*04:01; TUBA3C; ENSG00000198033; TAA
MLYRGDVVPK

SEQ ID NO: 95021 - protein, 10 aa, Homo sapiens
  Table A; Target 95021; HLA-C*06:02; TUBA3C; ENSG00000198033; TAA
MLYRGDVVPK

SEQ ID NO: 95022 - protein, 10 aa, Homo sapiens
  Table A; Target 95022; HLA-C*07:01; TUBA3C; ENSG00000198033; TAA
MLYRGDVVPK

SEQ ID NO: 95023 - protein, 10 aa, Homo sapiens
  Table A; Target 95023; HLA-C*07:02; TUBA3C; ENSG00000198033; TAA
MLYRGDVVPK

SEQ ID NO: 95024 - protein, 10 aa, Homo sapiens
  Table A; Target 95024; HLA-C*07:04; TUBA3C; ENSG00000198033; TAA
MLYRGDVVPK

SEQ ID NO: 95025 - protein, 10 aa, Homo sapiens
  Table A; Target 95025; HLA-C*12:03; TUBA3C; ENSG00000198033; TAA
MLYRGDVVPK

SEQ ID NO: 95026 - protein, 9 aa, Homo sapiens
  Table A; Target 95026; HLA-B*07:02; TUBA3C; ENSG00000198033; TAA
MPSDKTIGG

SEQ ID NO: 95027 - protein, 9 aa, Homo sapiens
  Table A; Target 95027; HLA-B*35:01; TUBA3C; ENSG00000198033; TAA
MPSDKTIGG

SEQ ID NO: 95028 - protein, 9 aa, Homo sapiens
  Table A; Target 95028; HLA-B*35:03; TUBA3C; ENSG00000198033; TAA
MPSDKTIGG

SEQ ID NO: 95029 - protein, 9 aa, Homo sapiens
  Table A; Target 95029; HLA-B*54:01; TUBA3C; ENSG00000198033; TAA
MPSDKTIGG

SEQ ID NO: 95030 - protein, 9 aa, Homo sapiens
  Table A; Target 95030; HLA-B*55:01; TUBA3C; ENSG00000198033; TAA
MPSDKTIGG

SEQ ID NO: 95031 - protein, 9 aa, Homo sapiens
  Table A; Target 95031; HLA-B*56:01; TUBA3C; ENSG00000198033; TAA
MPSDKTIGG

SEQ ID NO: 95032 - protein, 9 aa, Homo sapiens
  Table A; Target 95032; HLA-C*04:01; TUBA3C; ENSG00000198033; TAA
MPSDKTIGG

SEQ ID NO: 95033 - protein, 10 aa, Homo sapiens
  Table A; Target 95033; HLA-C*04:01; TUBA3C; ENSG00000198033; TAA
MPSDKTIGGG

SEQ ID NO: 95034 - protein, 8 aa, Homo sapiens
  Table A; Target 95034; HLA-A*01:01; TUBA3C; ENSG00000198033; TAA
MVDNEAIY

SEQ ID NO: 95035 - protein, 8 aa, Homo sapiens
  Table A; Target 95035; HLA-B*35:01; TUBA3C; ENSG00000198033; TAA
MVDNEAIY

SEQ ID NO: 95036 - protein, 8 aa, Homo sapiens
  Table A; Target 95036; HLA-B*55:01; TUBA3C; ENSG00000198033; TAA
MVDNEAIY

SEQ ID NO: 95037 - protein, 8 aa, Homo sapiens
  Table A; Target 95037; HLA-C*03:03; TUBA3C; ENSG00000198033; TAA
MVDNEAIY

SEQ ID NO: 95038 - protein, 8 aa, Homo sapiens
  Table A; Target 95038; HLA-C*04:01; TUBA3C; ENSG00000198033; TAA
MVDNEAIY

SEQ ID NO: 95039 - protein, 8 aa, Homo sapiens
  Table A; Target 95039; HLA-C*05:01; TUBA3C; ENSG00000198033; TAA
MVDNEAIY

SEQ ID NO: 95040 - protein, 8 aa, Homo sapiens
  Table A; Target 95040; HLA-C*07:01; TUBA3C; ENSG00000198033; TAA
MVDNEAIY

SEQ ID NO: 95041 - protein, 10 aa, Homo sapiens
  Table A; Target 95041; HLA-A*01:01; TUBA3C; ENSG00000198033; TAA
MVDNEAIYDI

SEQ ID NO: 95042 - protein, 10 aa, Homo sapiens
  Table A; Target 95042; HLA-A*02:01; TUBA3C; ENSG00000198033; TAA
MVDNEAIYDI

SEQ ID NO: 95043 - protein, 10 aa, Homo sapiens
  Table A; Target 95043; HLA-A*02:07; TUBA3C; ENSG00000198033; TAA
MVDNEAIYDI

SEQ ID NO: 95044 - protein, 10 aa, Homo sapiens
  Table A; Target 95044; HLA-A*68:02; TUBA3C; ENSG00000198033; TAA
MVDNEAIYDI

SEQ ID NO: 95045 - protein, 10 aa, Homo sapiens
  Table A; Target 95045; HLA-B*07:02; TUBA3C; ENSG00000198033; TAA
MVDNEAIYDI

SEQ ID NO: 95046 - protein, 10 aa, Homo sapiens
  Table A; Target 95046; HLA-B*27:02; TUBA3C; ENSG00000198033; TAA
MVDNEAIYDI

SEQ ID NO: 95047 - protein, 10 aa, Homo sapiens
  Table A; Target 95047; HLA-B*27:05; TUBA3C; ENSG00000198033; TAA
MVDNEAIYDI

SEQ ID NO: 95048 - protein, 10 aa, Homo sapiens
  Table A; Target 95048; HLA-B*35:03; TUBA3C; ENSG00000198033; TAA
MVDNEAIYDI

SEQ ID NO: 95049 - protein, 10 aa, Homo sapiens
  Table A; Target 95049; HLA-B*38:01; TUBA3C; ENSG00000198033; TAA
MVDNEAIYDI

SEQ ID NO: 95050 - protein, 10 aa, Homo sapiens
  Table A; Target 95050; HLA-B*55:01; TUBA3C; ENSG00000198033; TAA
MVDNEAIYDI

SEQ ID NO: 95051 - protein, 10 aa, Homo sapiens
  Table A; Target 95051; HLA-C*04:01; TUBA3C; ENSG00000198033; TAA
MVDNEAIYDI

SEQ ID NO: 95052 - protein, 10 aa, Homo sapiens
  Table A; Target 95052; HLA-C*05:01; TUBA3C; ENSG00000198033; TAA
MVDNEAIYDI

SEQ ID NO: 95053 - protein, 10 aa, Homo sapiens
  Table A; Target 95053; HLA-C*07:01; TUBA3C; ENSG00000198033; TAA
MVDNEAIYDI

SEQ ID NO: 95054 - protein, 10 aa, Homo sapiens
  Table A; Target 95054; HLA-C*07:02; TUBA3C; ENSG00000198033; TAA
MVDNEAIYDI

SEQ ID NO: 95055 - protein, 10 aa, Homo sapiens
  Table A; Target 95055; HLA-A*24:02; TUBA3C; ENSG00000198033; TAA
MYAKRAFVHW

SEQ ID NO: 95056 - protein, 8 aa, Homo sapiens
  Table A; Target 95056; HLA-B*27:02; TUBA3C; ENSG00000198033; TAA
NAAIATIK

SEQ ID NO: 95057 - protein, 8 aa, Homo sapiens
  Table A; Target 95057; HLA-B*27:05; TUBA3C; ENSG00000198033; TAA
NAAIATIK

SEQ ID NO: 95058 - protein, 8 aa, Homo sapiens
  Table A; Target 95058; HLA-B*51:01; TUBA3C; ENSG00000198033; TAA
NAAIATIK

SEQ ID NO: 95059 - protein, 8 aa, Homo sapiens
  Table A; Target 95059; HLA-C*07:01; TUBA3C; ENSG00000198033; TAA
NAAIATIK

SEQ ID NO: 95060 - protein, 8 aa, Homo sapiens
  Table A; Target 95060; HLA-C*07:06; TUBA3C; ENSG00000198033; TAA
NAAIATIK

SEQ ID NO: 95061 - protein, 8 aa, Homo sapiens
  Table A; Target 95061; HLA-C*12:03; TUBA3C; ENSG00000198033; TAA
NAAIATIK

SEQ ID NO: 95062 - protein, 9 aa, Homo sapiens
  Table A; Target 95062; HLA-B*51:01; TUBA3C; ENSG00000198033; TAA
NAAIATIKT

SEQ ID NO: 95063 - protein, 9 aa, Homo sapiens
  Table A; Target 95063; HLA-B*54:01; TUBA3C; ENSG00000198033; TAA
NAAIATIKT

SEQ ID NO: 95064 - protein, 9 aa, Homo sapiens
  Table A; Target 95064; HLA-C*06:02; TUBA3C; ENSG00000198033; TAA
NAAIATIKT

SEQ ID NO: 95065 - protein, 9 aa, Homo sapiens
  Table A; Target 95065; HLA-C*07:01; TUBA3C; ENSG00000198033; TAA
NAAIATIKT

SEQ ID NO: 95066 - protein, 9 aa, Homo sapiens
  Table A; Target 95066; HLA-C*07:02; TUBA3C; ENSG00000198033; TAA
NAAIATIKT

SEQ ID NO: 95067 - protein, 9 aa, Homo sapiens
  Table A; Target 95067; HLA-C*07:04; TUBA3C; ENSG00000198033; TAA
NAAIATIKT

SEQ ID NO: 95068 - protein, 9 aa, Homo sapiens
  Table A; Target 95068; HLA-C*12:03; TUBA3C; ENSG00000198033; TAA
NAAIATIKT

SEQ ID NO: 95069 - protein, 9 aa, Homo sapiens
  Table A; Target 95069; HLA-C*16:01; TUBA3C; ENSG00000198033; TAA
NAAIATIKT

SEQ ID NO: 95070 - protein, 9 aa, Homo sapiens
  Table A; Target 95070; HLA-C*16:02; TUBA3C; ENSG00000198033; TAA
NAAIATIKT

SEQ ID NO: 95071 - protein, 10 aa, Homo sapiens
  Table A; Target 95071; HLA-A*11:01; TUBA3C; ENSG00000198033; TAA
NAAIATIKTK

SEQ ID NO: 95072 - protein, 10 aa, Homo sapiens
  Table A; Target 95072; HLA-A*33:01; TUBA3C; ENSG00000198033; TAA
NAAIATIKTK

SEQ ID NO: 95073 - protein, 10 aa, Homo sapiens
  Table A; Target 95073; HLA-A*33:03; TUBA3C; ENSG00000198033; TAA
NAAIATIKTK

SEQ ID NO: 95074 - protein, 10 aa, Homo sapiens
  Table A; Target 95074; HLA-A*68:01; TUBA3C; ENSG00000198033; TAA
NAAIATIKTK

SEQ ID NO: 95075 - protein, 10 aa, Homo sapiens
  Table A; Target 95075; HLA-B*07:02; TUBA3C; ENSG00000198033; TAA
NAAIATIKTK

SEQ ID NO: 95076 - protein, 10 aa, Homo sapiens
  Table A; Target 95076; HLA-B*27:02; TUBA3C; ENSG00000198033; TAA
NAAIATIKTK

SEQ ID NO: 95077 - protein, 10 aa, Homo sapiens
  Table A; Target 95077; HLA-C*04:01; TUBA3C; ENSG00000198033; TAA
NAAIATIKTK

SEQ ID NO: 95078 - protein, 10 aa, Homo sapiens
  Table A; Target 95078; HLA-C*06:02; TUBA3C; ENSG00000198033; TAA
NAAIATIKTK

SEQ ID NO: 95079 - protein, 10 aa, Homo sapiens
  Table A; Target 95079; HLA-C*07:01; TUBA3C; ENSG00000198033; TAA
NAAIATIKTK

SEQ ID NO: 95080 - protein, 10 aa, Homo sapiens
  Table A; Target 95080; HLA-C*07:06; TUBA3C; ENSG00000198033; TAA
NAAIATIKTK

SEQ ID NO: 95081 - protein, 11 aa, Homo sapiens
  Table A; Target 95081; HLA-A*33:01; TUBA3C; ENSG00000198033; TAA
NAAIATIKTKR

SEQ ID NO: 95082 - protein, 11 aa, Homo sapiens
  Table A; Target 95082; HLA-A*33:03; TUBA3C; ENSG00000198033; TAA
NAAIATIKTKR

SEQ ID NO: 95083 - protein, 11 aa, Homo sapiens
  Table A; Target 95083; HLA-A*68:01; TUBA3C; ENSG00000198033; TAA
NAAIATIKTKR

SEQ ID NO: 95084 - protein, 11 aa, Homo sapiens
  Table A; Target 95084; HLA-A*68:02; TUBA3C; ENSG00000198033; TAA
NAAIATIKTKR

SEQ ID NO: 95085 - protein, 11 aa, Homo sapiens
  Table A; Target 95085; HLA-C*07:06; TUBA3C; ENSG00000198033; TAA
NAAIATIKTKR

SEQ ID NO: 95086 - protein, 10 aa, Homo sapiens
  Table A; Target 95086; HLA-B*35:01; TUBA3C; ENSG00000198033; TAA
NACFEPANQM

SEQ ID NO: 95087 - protein, 10 aa, Homo sapiens
  Table A; Target 95087; HLA-B*35:03; TUBA3C; ENSG00000198033; TAA
NACFEPANQM

SEQ ID NO: 95088 - protein, 10 aa, Homo sapiens
  Table A; Target 95088; HLA-C*06:02; TUBA3C; ENSG00000198033; TAA
NACFEPANQM

SEQ ID NO: 95089 - protein, 10 aa, Homo sapiens
  Table A; Target 95089; HLA-C*07:01; TUBA3C; ENSG00000198033; TAA
NACFEPANQM

SEQ ID NO: 95090 - protein, 10 aa, Homo sapiens
  Table A; Target 95090; HLA-C*12:03; TUBA3C; ENSG00000198033; TAA
NACFEPANQM

SEQ ID NO: 95091 - protein, 9 aa, Homo sapiens
  Table A; Target 95091; HLA-A*68:01; TUBA3C; ENSG00000198033; TAA
NEAIYDICR

SEQ ID NO: 95092 - protein, 9 aa, Homo sapiens
  Table A; Target 95092; HLA-A*01:01; TUBA3C; ENSG00000198033; TAA
NLDIERPTY

SEQ ID NO: 95093 - protein, 9 aa, Homo sapiens
  Table A; Target 95093; HLA-A*02:07; TUBA3C; ENSG00000198033; TAA
NLDIERPTY

SEQ ID NO: 95094 - protein, 9 aa, Homo sapiens
  Table A; Target 95094; HLA-A*03:02; TUBA3C; ENSG00000198033; TAA
NLDIERPTY

SEQ ID NO: 95095 - protein, 9 aa, Homo sapiens
  Table A; Target 95095; HLA-A*25:01; TUBA3C; ENSG00000198033; TAA
NLDIERPTY

SEQ ID NO: 95096 - protein, 9 aa, Homo sapiens
  Table A; Target 95096; HLA-A*26:01; TUBA3C; ENSG00000198033; TAA
NLDIERPTY

SEQ ID NO: 95097 - protein, 9 aa, Homo sapiens
  Table A; Target 95097; HLA-A*29:02; TUBA3C; ENSG00000198033; TAA
NLDIERPTY

SEQ ID NO: 95098 - protein, 9 aa, Homo sapiens
  Table A; Target 95098; HLA-A*30:02; TUBA3C; ENSG00000198033; TAA
NLDIERPTY

SEQ ID NO: 95099 - protein, 9 aa, Homo sapiens
  Table A; Target 95099; HLA-A*32:01; TUBA3C; ENSG00000198033; TAA
NLDIERPTY

SEQ ID NO: 95100 - protein, 9 aa, Homo sapiens
  Table A; Target 95100; HLA-B*15:01; TUBA3C; ENSG00000198033; TAA
NLDIERPTY

SEQ ID NO: 95101 - protein, 9 aa, Homo sapiens
  Table A; Target 95101; HLA-B*15:03; TUBA3C; ENSG00000198033; TAA
NLDIERPTY

SEQ ID NO: 95102 - protein, 9 aa, Homo sapiens
  Table A; Target 95102; HLA-B*18:01; TUBA3C; ENSG00000198033; TAA
NLDIERPTY

SEQ ID NO: 95103 - protein, 9 aa, Homo sapiens
  Table A; Target 95103; HLA-B*27:05; TUBA3C; ENSG00000198033; TAA
NLDIERPTY

SEQ ID NO: 95104 - protein, 9 aa, Homo sapiens
  Table A; Target 95104; HLA-B*35:01; TUBA3C; ENSG00000198033; TAA
NLDIERPTY

SEQ ID NO: 95105 - protein, 9 aa, Homo sapiens
  Table A; Target 95105; HLA-B*38:01; TUBA3C; ENSG00000198033; TAA
NLDIERPTY

SEQ ID NO: 95106 - protein, 9 aa, Homo sapiens
  Table A; Target 95106; HLA-B*39:01; TUBA3C; ENSG00000198033; TAA
NLDIERPTY

SEQ ID NO: 95107 - protein, 9 aa, Homo sapiens
  Table A; Target 95107; HLA-B*44:02; TUBA3C; ENSG00000198033; TAA
NLDIERPTY

SEQ ID NO: 95108 - protein, 9 aa, Homo sapiens
  Table A; Target 95108; HLA-B*44:03; TUBA3C; ENSG00000198033; TAA
NLDIERPTY

SEQ ID NO: 95109 - protein, 9 aa, Homo sapiens
  Table A; Target 95109; HLA-B*46:01; TUBA3C; ENSG00000198033; TAA
NLDIERPTY

SEQ ID NO: 95110 - protein, 9 aa, Homo sapiens
  Table A; Target 95110; HLA-B*55:01; TUBA3C; ENSG00000198033; TAA
NLDIERPTY

SEQ ID NO: 95111 - protein, 9 aa, Homo sapiens
  Table A; Target 95111; HLA-B*58:01; TUBA3C; ENSG00000198033; TAA
NLDIERPTY

SEQ ID NO: 95112 - protein, 9 aa, Homo sapiens
  Table A; Target 95112; HLA-C*02:02; TUBA3C; ENSG00000198033; TAA
NLDIERPTY

SEQ ID NO: 95113 - protein, 9 aa, Homo sapiens
  Table A; Target 95113; HLA-C*03:03; TUBA3C; ENSG00000198033; TAA
NLDIERPTY

SEQ ID NO: 95114 - protein, 9 aa, Homo sapiens
  Table A; Target 95114; HLA-C*04:01; TUBA3C; ENSG00000198033; TAA
NLDIERPTY

SEQ ID NO: 95115 - protein, 9 aa, Homo sapiens
  Table A; Target 95115; HLA-C*05:01; TUBA3C; ENSG00000198033; TAA
NLDIERPTY

SEQ ID NO: 95116 - protein, 9 aa, Homo sapiens
  Table A; Target 95116; HLA-C*07:01; TUBA3C; ENSG00000198033; TAA
NLDIERPTY

SEQ ID NO: 95117 - protein, 9 aa, Homo sapiens
  Table A; Target 95117; HLA-C*07:04; TUBA3C; ENSG00000198033; TAA
NLDIERPTY

SEQ ID NO: 95118 - protein, 9 aa, Homo sapiens
  Table A; Target 95118; HLA-C*12:03; TUBA3C; ENSG00000198033; TAA
NLDIERPTY

SEQ ID NO: 95119 - protein, 9 aa, Homo sapiens
  Table A; Target 95119; HLA-C*16:01; TUBA3C; ENSG00000198033; TAA
NLDIERPTY

SEQ ID NO: 95120 - protein, 9 aa, Homo sapiens
  Table A; Target 95120; HLA-C*16:02; TUBA3C; ENSG00000198033; TAA
NLDIERPTY

SEQ ID NO: 95121 - protein, 9 aa, Homo sapiens
  Table A; Target 95121; HLA-C*16:04; TUBA3C; ENSG00000198033; TAA
NLDIERPTY

SEQ ID NO: 95122 - protein, 10 aa, Homo sapiens
  Table A; Target 95122; HLA-A*01:01; TUBA3C; ENSG00000198033; TAA
NLDIERPTYT

SEQ ID NO: 95123 - protein, 9 aa, Homo sapiens
  Table A; Target 95123; HLA-A*02:03; TUBA3C; ENSG00000198033; TAA
NLNRLIGQI

SEQ ID NO: 95124 - protein, 9 aa, Homo sapiens
  Table A; Target 95124; HLA-A*02:04; TUBA3C; ENSG00000198033; TAA
NLNRLIGQI

SEQ ID NO: 95125 - protein, 9 aa, Homo sapiens
  Table A; Target 95125; HLA-A*02:07; TUBA3C; ENSG00000198033; TAA
NLNRLIGQI

SEQ ID NO: 95126 - protein, 8 aa, Homo sapiens
  Table A; Target 95126; HLA-C*06:02; TUBA3C; ENSG00000198033; TAA
NRLIGQIV

SEQ ID NO: 95127 - protein, 8 aa, Homo sapiens
  Table A; Target 95127; HLA-C*07:01; TUBA3C; ENSG00000198033; TAA
NRLIGQIV

SEQ ID NO: 95128 - protein, 9 aa, Homo sapiens
  Table A; Target 95128; HLA-B*27:05; TUBA3C; ENSG00000198033; TAA
NRLIGQIVS

SEQ ID NO: 95129 - protein, 9 aa, Homo sapiens
  Table A; Target 95129; HLA-C*07:01; TUBA3C; ENSG00000198033; TAA
NRLIGQIVS

SEQ ID NO: 95130 - protein, 10 aa, Homo sapiens
  Table A; Target 95130; HLA-B*27:05; TUBA3C; ENSG00000198033; TAA
NRLIGQIVSS

SEQ ID NO: 95131 - protein, 8 aa, Homo sapiens
  Table A; Target 95131; HLA-C*06:02; TUBA3C; ENSG00000198033; TAA
NSILTTHT

SEQ ID NO: 95132 - protein, 8 aa, Homo sapiens
  Table A; Target 95132; HLA-C*07:01; TUBA3C; ENSG00000198033; TAA
NSILTTHT

SEQ ID NO: 95133 - protein, 9 aa, Homo sapiens
  Table A; Target 95133; HLA-B*58:01; TUBA3C; ENSG00000198033; TAA
NSILTTHTT

SEQ ID NO: 95134 - protein, 9 aa, Homo sapiens
  Table A; Target 95134; HLA-C*06:02; TUBA3C; ENSG00000198033; TAA
NSILTTHTT

SEQ ID NO: 95135 - protein, 9 aa, Homo sapiens
  Table A; Target 95135; HLA-C*07:01; TUBA3C; ENSG00000198033; TAA
NSILTTHTT

SEQ ID NO: 95136 - protein, 9 aa, Homo sapiens
  Table A; Target 95136; HLA-C*16:01; TUBA3C; ENSG00000198033; TAA
NSILTTHTT

SEQ ID NO: 95137 - protein, 10 aa, Homo sapiens
  Table A; Target 95137; HLA-A*68:01; TUBA3C; ENSG00000198033; TAA
NSILTTHTTL

SEQ ID NO: 95138 - protein, 10 aa, Homo sapiens
  Table A; Target 95138; HLA-A*68:02; TUBA3C; ENSG00000198033; TAA
NSILTTHTTL

SEQ ID NO: 95139 - protein, 10 aa, Homo sapiens
  Table A; Target 95139; HLA-B*40:02; TUBA3C; ENSG00000198033; TAA
NSILTTHTTL

SEQ ID NO: 95140 - protein, 10 aa, Homo sapiens
  Table A; Target 95140; HLA-B*58:01; TUBA3C; ENSG00000198033; TAA
NSILTTHTTL

SEQ ID NO: 95141 - protein, 10 aa, Homo sapiens
  Table A; Target 95141; HLA-C*01:02; TUBA3C; ENSG00000198033; TAA
NSILTTHTTL

SEQ ID NO: 95142 - protein, 10 aa, Homo sapiens
  Table A; Target 95142; HLA-C*03:03; TUBA3C; ENSG00000198033; TAA
NSILTTHTTL

SEQ ID NO: 95143 - protein, 10 aa, Homo sapiens
  Table A; Target 95143; HLA-C*06:02; TUBA3C; ENSG00000198033; TAA
NSILTTHTTL

SEQ ID NO: 95144 - protein, 10 aa, Homo sapiens
  Table A; Target 95144; HLA-C*07:01; TUBA3C; ENSG00000198033; TAA
NSILTTHTTL

SEQ ID NO: 95145 - protein, 8 aa, Homo sapiens
  Table A; Target 95145; HLA-C*07:01; TUBA3C; ENSG00000198033; TAA
NTFFSETG

SEQ ID NO: 95146 - protein, 9 aa, Homo sapiens
  Table A; Target 95146; HLA-A*68:02; TUBA3C; ENSG00000198033; TAA
NTFFSETGA

SEQ ID NO: 95147 - protein, 9 aa, Homo sapiens
  Table A; Target 95147; HLA-B*27:05; TUBA3C; ENSG00000198033; TAA
NTFFSETGA

SEQ ID NO: 95148 - protein, 9 aa, Homo sapiens
  Table A; Target 95148; HLA-B*54:01; TUBA3C; ENSG00000198033; TAA
NTFFSETGA

SEQ ID NO: 95149 - protein, 9 aa, Homo sapiens
  Table A; Target 95149; HLA-C*06:02; TUBA3C; ENSG00000198033; TAA
NTFFSETGA

SEQ ID NO: 95150 - protein, 10 aa, Homo sapiens
  Table A; Target 95150; HLA-B*27:05; TUBA3C; ENSG00000198033; TAA
NTFFSETGAG

SEQ ID NO: 95151 - protein, 10 aa, Homo sapiens
  Table A; Target 95151; HLA-C*07:01; TUBA3C; ENSG00000198033; TAA
NTFFSETGAG

SEQ ID NO: 95152 - protein, 11 aa, Homo sapiens
  Table A; Target 95152; HLA-A*01:01; TUBA3C; ENSG00000198033; TAA
NTFFSETGAGK

SEQ ID NO: 95153 - protein, 11 aa, Homo sapiens
  Table A; Target 95153; HLA-A*03:01; TUBA3C; ENSG00000198033; TAA
NTFFSETGAGK

SEQ ID NO: 95154 - protein, 11 aa, Homo sapiens
  Table A; Target 95154; HLA-A*03:02; TUBA3C; ENSG00000198033; TAA
NTFFSETGAGK

SEQ ID NO: 95155 - protein, 11 aa, Homo sapiens
  Table A; Target 95155; HLA-A*11:01; TUBA3C; ENSG00000198033; TAA
NTFFSETGAGK

SEQ ID NO: 95156 - protein, 11 aa, Homo sapiens
  Table A; Target 95156; HLA-A*33:01; TUBA3C; ENSG00000198033; TAA
NTFFSETGAGK

SEQ ID NO: 95157 - protein, 11 aa, Homo sapiens
  Table A; Target 95157; HLA-A*33:03; TUBA3C; ENSG00000198033; TAA
NTFFSETGAGK

SEQ ID NO: 95158 - protein, 11 aa, Homo sapiens
  Table A; Target 95158; HLA-A*68:01; TUBA3C; ENSG00000198033; TAA
NTFFSETGAGK

SEQ ID NO: 95159 - protein, 11 aa, Homo sapiens
  Table A; Target 95159; HLA-A*68:02; TUBA3C; ENSG00000198033; TAA
NTFFSETGAGK

SEQ ID NO: 95160 - protein, 11 aa, Homo sapiens
  Table A; Target 95160; HLA-B*27:02; TUBA3C; ENSG00000198033; TAA
NTFFSETGAGK

SEQ ID NO: 95161 - protein, 11 aa, Homo sapiens
  Table A; Target 95161; HLA-B*27:05; TUBA3C; ENSG00000198033; TAA
NTFFSETGAGK

SEQ ID NO: 95162 - protein, 11 aa, Homo sapiens
  Table A; Target 95162; HLA-C*06:02; TUBA3C; ENSG00000198033; TAA
NTFFSETGAGK

SEQ ID NO: 95163 - protein, 11 aa, Homo sapiens
  Table A; Target 95163; HLA-C*07:06; TUBA3C; ENSG00000198033; TAA
NTFFSETGAGK

SEQ ID NO: 95164 - protein, 9 aa, Homo sapiens
  Table A; Target 95164; HLA-A*01:01; TUBA3C; ENSG00000198033; TAA
NTTAIAEAW

SEQ ID NO: 95165 - protein, 9 aa, Homo sapiens
  Table A; Target 95165; HLA-A*03:02; TUBA3C; ENSG00000198033; TAA
NTTAIAEAW

SEQ ID NO: 95166 - protein, 9 aa, Homo sapiens
  Table A; Target 95166; HLA-A*23:01; TUBA3C; ENSG00000198033; TAA
NTTAIAEAW

SEQ ID NO: 95167 - protein, 9 aa, Homo sapiens
  Table A; Target 95167; HLA-A*24:02; TUBA3C; ENSG00000198033; TAA
NTTAIAEAW

SEQ ID NO: 95168 - protein, 9 aa, Homo sapiens
  Table A; Target 95168; HLA-A*25:01; TUBA3C; ENSG00000198033; TAA
NTTAIAEAW

SEQ ID NO: 95169 - protein, 9 aa, Homo sapiens
  Table A; Target 95169; HLA-A*26:01; TUBA3C; ENSG00000198033; TAA
NTTAIAEAW

SEQ ID NO: 95170 - protein, 9 aa, Homo sapiens
  Table A; Target 95170; HLA-A*29:02; TUBA3C; ENSG00000198033; TAA
NTTAIAEAW

SEQ ID NO: 95171 - protein, 9 aa, Homo sapiens
  Table A; Target 95171; HLA-A*30:02; TUBA3C; ENSG00000198033; TAA
NTTAIAEAW

SEQ ID NO: 95172 - protein, 9 aa, Homo sapiens
  Table A; Target 95172; HLA-A*32:01; TUBA3C; ENSG00000198033; TAA
NTTAIAEAW

SEQ ID NO: 95173 - protein, 9 aa, Homo sapiens
  Table A; Target 95173; HLA-A*33:01; TUBA3C; ENSG00000198033; TAA
NTTAIAEAW

SEQ ID NO: 95174 - protein, 9 aa, Homo sapiens
  Table A; Target 95174; HLA-A*33:03; TUBA3C; ENSG00000198033; TAA
NTTAIAEAW

SEQ ID NO: 95175 - protein, 9 aa, Homo sapiens
  Table A; Target 95175; HLA-A*68:01; TUBA3C; ENSG00000198033; TAA
NTTAIAEAW

SEQ ID NO: 95176 - protein, 9 aa, Homo sapiens
  Table A; Target 95176; HLA-A*68:02; TUBA3C; ENSG00000198033; TAA
NTTAIAEAW

SEQ ID NO: 95177 - protein, 9 aa, Homo sapiens
  Table A; Target 95177; HLA-B*07:02; TUBA3C; ENSG00000198033; TAA
NTTAIAEAW

SEQ ID NO: 95178 - protein, 9 aa, Homo sapiens
  Table A; Target 95178; HLA-B*15:01; TUBA3C; ENSG00000198033; TAA
NTTAIAEAW

SEQ ID NO: 95179 - protein, 9 aa, Homo sapiens
  Table A; Target 95179; HLA-B*18:01; TUBA3C; ENSG00000198033; TAA
NTTAIAEAW

SEQ ID NO: 95180 - protein, 9 aa, Homo sapiens
  Table A; Target 95180; HLA-B*27:02; TUBA3C; ENSG00000198033; TAA
NTTAIAEAW

SEQ ID NO: 95181 - protein, 9 aa, Homo sapiens
  Table A; Target 95181; HLA-B*27:05; TUBA3C; ENSG00000198033; TAA
NTTAIAEAW

SEQ ID NO: 95182 - protein, 9 aa, Homo sapiens
  Table A; Target 95182; HLA-B*35:01; TUBA3C; ENSG00000198033; TAA
NTTAIAEAW

SEQ ID NO: 95183 - protein, 9 aa, Homo sapiens
  Table A; Target 95183; HLA-B*35:03; TUBA3C; ENSG00000198033; TAA
NTTAIAEAW

SEQ ID NO: 95184 - protein, 9 aa, Homo sapiens
  Table A; Target 95184; HLA-B*38:01; TUBA3C; ENSG00000198033; TAA
NTTAIAEAW

SEQ ID NO: 95185 - protein, 9 aa, Homo sapiens
  Table A; Target 95185; HLA-B*39:01; TUBA3C; ENSG00000198033; TAA
NTTAIAEAW

SEQ ID NO: 95186 - protein, 9 aa, Homo sapiens
  Table A; Target 95186; HLA-B*44:02; TUBA3C; ENSG00000198033; TAA
NTTAIAEAW

SEQ ID NO: 95187 - protein, 9 aa, Homo sapiens
  Table A; Target 95187; HLA-B*44:03; TUBA3C; ENSG00000198033; TAA
NTTAIAEAW

SEQ ID NO: 95188 - protein, 9 aa, Homo sapiens
  Table A; Target 95188; HLA-B*57:01; TUBA3C; ENSG00000198033; TAA
NTTAIAEAW

SEQ ID NO: 95189 - protein, 9 aa, Homo sapiens
  Table A; Target 95189; HLA-B*58:01; TUBA3C; ENSG00000198033; TAA
NTTAIAEAW

SEQ ID NO: 95190 - protein, 9 aa, Homo sapiens
  Table A; Target 95190; HLA-C*01:02; TUBA3C; ENSG00000198033; TAA
NTTAIAEAW

SEQ ID NO: 95191 - protein, 9 aa, Homo sapiens
  Table A; Target 95191; HLA-C*02:02; TUBA3C; ENSG00000198033; TAA
NTTAIAEAW

SEQ ID NO: 95192 - protein, 9 aa, Homo sapiens
  Table A; Target 95192; HLA-C*04:01; TUBA3C; ENSG00000198033; TAA
NTTAIAEAW

SEQ ID NO: 95193 - protein, 9 aa, Homo sapiens
  Table A; Target 95193; HLA-C*06:02; TUBA3C; ENSG00000198033; TAA
NTTAIAEAW

SEQ ID NO: 95194 - protein, 9 aa, Homo sapiens
  Table A; Target 95194; HLA-C*07:01; TUBA3C; ENSG00000198033; TAA
NTTAIAEAW

SEQ ID NO: 95195 - protein, 9 aa, Homo sapiens
  Table A; Target 95195; HLA-C*07:02; TUBA3C; ENSG00000198033; TAA
NTTAIAEAW

SEQ ID NO: 95196 - protein, 9 aa, Homo sapiens
  Table A; Target 95196; HLA-C*07:04; TUBA3C; ENSG00000198033; TAA
NTTAIAEAW

SEQ ID NO: 95197 - protein, 9 aa, Homo sapiens
  Table A; Target 95197; HLA-C*07:06; TUBA3C; ENSG00000198033; TAA
NTTAIAEAW

SEQ ID NO: 95198 - protein, 9 aa, Homo sapiens
  Table A; Target 95198; HLA-C*12:03; TUBA3C; ENSG00000198033; TAA
NTTAIAEAW

SEQ ID NO: 95199 - protein, 9 aa, Homo sapiens
  Table A; Target 95199; HLA-C*14:02; TUBA3C; ENSG00000198033; TAA
NTTAIAEAW

SEQ ID NO: 95200 - protein, 9 aa, Homo sapiens
  Table A; Target 95200; HLA-C*16:01; TUBA3C; ENSG00000198033; TAA
NTTAIAEAW

SEQ ID NO: 95201 - protein, 9 aa, Homo sapiens
  Table A; Target 95201; HLA-C*16:02; TUBA3C; ENSG00000198033; TAA
NTTAIAEAW

SEQ ID NO: 95202 - protein, 9 aa, Homo sapiens
  Table A; Target 95202; HLA-C*16:04; TUBA3C; ENSG00000198033; TAA
NTTAIAEAW

SEQ ID NO: 95203 - protein, 11 aa, Homo sapiens
  Table A; Target 95203; HLA-A*33:03; TUBA3C; ENSG00000198033; TAA
NTTAIAEAWAR

SEQ ID NO: 95204 - protein, 11 aa, Homo sapiens
  Table A; Target 95204; HLA-A*68:01; TUBA3C; ENSG00000198033; TAA
NTTAIAEAWAR

SEQ ID NO: 95205 - protein, 11 aa, Homo sapiens
  Table A; Target 95205; HLA-A*68:02; TUBA3C; ENSG00000198033; TAA
NTTAIAEAWAR

SEQ ID NO: 95206 - protein, 11 aa, Homo sapiens
  Table A; Target 95206; HLA-A*02:07; TUBA3C; ENSG00000198033; TAA
NVDLTEFQTNL

SEQ ID NO: 95207 - protein, 11 aa, Homo sapiens
  Table A; Target 95207; HLA-C*05:01; TUBA3C; ENSG00000198033; TAA
NVDLTEFQTNL

SEQ ID NO: 95208 - protein, 9 aa, Homo sapiens
  Table A; Target 95208; HLA-A*23:01; TUBA3C; ENSG00000198033; TAA
NYARGHYTI

SEQ ID NO: 95209 - protein, 9 aa, Homo sapiens
  Table A; Target 95209; HLA-A*24:02; TUBA3C; ENSG00000198033; TAA
NYARGHYTI

SEQ ID NO: 95210 - protein, 8 aa, Homo sapiens
  Table A; Target 95210; HLA-C*04:01; TUBA3C; ENSG00000198033; TAA
NYQPPTVV

SEQ ID NO: 95211 - protein, 8 aa, Homo sapiens
  Table A; Target 95211; HLA-C*06:02; TUBA3C; ENSG00000198033; TAA
NYQPPTVV

SEQ ID NO: 95212 - protein, 8 aa, Homo sapiens
  Table A; Target 95212; HLA-C*12:03; TUBA3C; ENSG00000198033; TAA
NYQPPTVV

SEQ ID NO: 95213 - protein, 8 aa, Homo sapiens
  Table A; Target 95213; HLA-C*14:02; TUBA3C; ENSG00000198033; TAA
NYQPPTVV

SEQ ID NO: 95214 - protein, 8 aa, Homo sapiens
  Table A; Target 95214; HLA-C*16:02; TUBA3C; ENSG00000198033; TAA
NYQPPTVV

SEQ ID NO: 95215 - protein, 9 aa, Homo sapiens
  Table A; Target 95215; HLA-C*14:02; TUBA3C; ENSG00000198033; TAA
NYQPPTVVP

SEQ ID NO: 95216 - protein, 10 aa, Homo sapiens
  Table A; Target 95216; HLA-A*24:02; TUBA3C; ENSG00000198033; TAA
NYQPPTVVPG

SEQ ID NO: 95217 - protein, 10 aa, Homo sapiens
  Table A; Target 95217; HLA-A*31:01; TUBA3C; ENSG00000198033; TAA
NYQPPTVVPG

SEQ ID NO: 95218 - protein, 10 aa, Homo sapiens
  Table A; Target 95218; HLA-A*33:01; TUBA3C; ENSG00000198033; TAA
NYQPPTVVPG

SEQ ID NO: 95219 - protein, 10 aa, Homo sapiens
  Table A; Target 95219; HLA-A*33:03; TUBA3C; ENSG00000198033; TAA
NYQPPTVVPG

SEQ ID NO: 95220 - protein, 10 aa, Homo sapiens
  Table A; Target 95220; HLA-C*01:02; TUBA3C; ENSG00000198033; TAA
NYQPPTVVPG

SEQ ID NO: 95221 - protein, 10 aa, Homo sapiens
  Table A; Target 95221; HLA-C*04:01; TUBA3C; ENSG00000198033; TAA
NYQPPTVVPG

SEQ ID NO: 95222 - protein, 10 aa, Homo sapiens
  Table A; Target 95222; HLA-C*06:02; TUBA3C; ENSG00000198033; TAA
NYQPPTVVPG

SEQ ID NO: 95223 - protein, 10 aa, Homo sapiens
  Table A; Target 95223; HLA-C*07:01; TUBA3C; ENSG00000198033; TAA
NYQPPTVVPG

SEQ ID NO: 95224 - protein, 10 aa, Homo sapiens
  Table A; Target 95224; HLA-C*07:02; TUBA3C; ENSG00000198033; TAA
NYQPPTVVPG

SEQ ID NO: 95225 - protein, 10 aa, Homo sapiens
  Table A; Target 95225; HLA-C*12:03; TUBA3C; ENSG00000198033; TAA
NYQPPTVVPG

SEQ ID NO: 95226 - protein, 10 aa, Homo sapiens
  Table A; Target 95226; HLA-C*14:02; TUBA3C; ENSG00000198033; TAA
NYQPPTVVPG

SEQ ID NO: 95227 - protein, 11 aa, Homo sapiens
  Table A; Target 95227; HLA-C*06:02; TUBA3C; ENSG00000198033; TAA
NYQPPTVVPGG

SEQ ID NO: 95228 - protein, 9 aa, Homo sapiens
  Table A; Target 95228; HLA-B*51:01; TUBA3C; ENSG00000198033; TAA
PAPQVSTAV

SEQ ID NO: 95229 - protein, 9 aa, Homo sapiens
  Table A; Target 95229; HLA-C*01:02; TUBA3C; ENSG00000198033; TAA
PAPQVSTAV

SEQ ID NO: 95230 - protein, 10 aa, Homo sapiens
  Table A; Target 95230; HLA-C*07:02; TUBA3C; ENSG00000198033; TAA
PAPQVSTAVV

SEQ ID NO: 95231 - protein, 8 aa, Homo sapiens
  Table A; Target 95231; HLA-B*27:02; TUBA3C; ENSG00000198033; TAA
PEQLITGK

SEQ ID NO: 95232 - protein, 8 aa, Homo sapiens
  Table A; Target 95232; HLA-C*06:02; TUBA3C; ENSG00000198033; TAA
PGGDLAKV

SEQ ID NO: 95233 - protein, 8 aa, Homo sapiens
  Table A; Target 95233; HLA-C*07:02; TUBA3C; ENSG00000198033; TAA
PGGDLAKV

SEQ ID NO: 95234 - protein, 9 aa, Homo sapiens
  Table A; Target 95234; HLA-A*24:02; TUBA3C; ENSG00000198033; TAA
PLATYAPVI

SEQ ID NO: 95235 - protein, 9 aa, Homo sapiens
  Table A; Target 95235; HLA-B*13:02; TUBA3C; ENSG00000198033; TAA
PLATYAPVI

SEQ ID NO: 95236 - protein, 9 aa, Homo sapiens
  Table A; Target 95236; HLA-C*06:02; TUBA3C; ENSG00000198033; TAA
PLATYAPVI

SEQ ID NO: 95237 - protein, 9 aa, Homo sapiens
  Table A; Target 95237; HLA-C*07:01; TUBA3C; ENSG00000198033; TAA
PLATYAPVI

SEQ ID NO: 95238 - protein, 9 aa, Homo sapiens
  Table A; Target 95238; HLA-C*07:02; TUBA3C; ENSG00000198033; TAA
PLATYAPVI

SEQ ID NO: 95239 - protein, 10 aa, Homo sapiens
  Table A; Target 95239; HLA-C*04:01; TUBA3C; ENSG00000198033; TAA
PLATYAPVIS

SEQ ID NO: 95240 - protein, 10 aa, Homo sapiens
  Table A; Target 95240; HLA-C*07:02; TUBA3C; ENSG00000198033; TAA
PLATYAPVIS

SEQ ID NO: 95241 - protein, 10 aa, Homo sapiens
  Table A; Target 95241; HLA-C*04:01; TUBA3C; ENSG00000198033; TAA
PPTVVPGGDL

SEQ ID NO: 95242 - protein, 11 aa, Homo sapiens
  Table A; Target 95242; HLA-B*27:02; TUBA3C; ENSG00000198033; TAA
PQVSTAVVEPY

SEQ ID NO: 95243 - protein, 11 aa, Homo sapiens
  Table A; Target 95243; HLA-C*04:01; TUBA3C; ENSG00000198033; TAA
PQVSTAVVEPY

SEQ ID NO: 95244 - protein, 11 aa, Homo sapiens
  Table A; Target 95244; HLA-C*07:01; TUBA3C; ENSG00000198033; TAA
PQVSTAVVEPY

SEQ ID NO: 95245 - protein, 11 aa, Homo sapiens
  Table A; Target 95245; HLA-C*07:02; TUBA3C; ENSG00000198033; TAA
PQVSTAVVEPY

SEQ ID NO: 95246 - protein, 8 aa, Homo sapiens
  Table A; Target 95246; HLA-B*07:02; TUBA3C; ENSG00000198033; TAA
PTGFKVGI

SEQ ID NO: 95247 - protein, 8 aa, Homo sapiens
  Table A; Target 95247; HLA-C*07:01; TUBA3C; ENSG00000198033; TAA
PTGFKVGI

SEQ ID NO: 95248 - protein, 8 aa, Homo sapiens
  Table A; Target 95248; HLA-C*07:02; TUBA3C; ENSG00000198033; TAA
PTGFKVGI

SEQ ID NO: 95249 - protein, 8 aa, Homo sapiens
  Table A; Target 95249; HLA-C*07:04; TUBA3C; ENSG00000198033; TAA
PTGFKVGI

SEQ ID NO: 95250 - protein, 10 aa, Homo sapiens
  Table A; Target 95250; HLA-A*01:01; TUBA3C; ENSG00000198033; TAA
PTGFKVGINY

SEQ ID NO: 95251 - protein, 10 aa, Homo sapiens
  Table A; Target 95251; HLA-C*07:01; TUBA3C; ENSG00000198033; TAA
PTGFKVGINY

SEQ ID NO: 95252 - protein, 8 aa, Homo sapiens
  Table A; Target 95252; HLA-B*27:02; TUBA3C; ENSG00000198033; TAA
PTVVDEVR

SEQ ID NO: 95253 - protein, 8 aa, Homo sapiens
  Table A; Target 95253; HLA-C*04:01; TUBA3C; ENSG00000198033; TAA
PTVVDEVR

SEQ ID NO: 95254 - protein, 9 aa, Homo sapiens
  Table A; Target 95254; HLA-C*04:01; TUBA3C; ENSG00000198033; TAA
PTVVPGGDL

SEQ ID NO: 95255 - protein, 9 aa, Homo sapiens
  Table A; Target 95255; HLA-C*06:02; TUBA3C; ENSG00000198033; TAA
PTVVPGGDL

SEQ ID NO: 95256 - protein, 9 aa, Homo sapiens
  Table A; Target 95256; HLA-C*07:02; TUBA3C; ENSG00000198033; TAA
PTVVPGGDL

SEQ ID NO: 95257 - protein, 11 aa, Homo sapiens
  Table A; Target 95257; HLA-A*01:01; TUBA3C; ENSG00000198033; TAA
PTVVPGGDLAK

SEQ ID NO: 95258 - protein, 11 aa, Homo sapiens
  Table A; Target 95258; HLA-A*11:01; TUBA3C; ENSG00000198033; TAA
PTVVPGGDLAK

SEQ ID NO: 95259 - protein, 11 aa, Homo sapiens
  Table A; Target 95259; HLA-B*27:02; TUBA3C; ENSG00000198033; TAA
PTVVPGGDLAK

SEQ ID NO: 95260 - protein, 8 aa, Homo sapiens
  Table A; Target 95260; HLA-A*03:01; TUBA3C; ENSG00000198033; TAA
PTYTNLNR

SEQ ID NO: 95261 - protein, 8 aa, Homo sapiens
  Table A; Target 95261; HLA-A*11:01; TUBA3C; ENSG00000198033; TAA
PTYTNLNR

SEQ ID NO: 95262 - protein, 8 aa, Homo sapiens
  Table A; Target 95262; HLA-A*31:01; TUBA3C; ENSG00000198033; TAA
PTYTNLNR

SEQ ID NO: 95263 - protein, 8 aa, Homo sapiens
  Table A; Target 95263; HLA-C*06:02; TUBA3C; ENSG00000198033; TAA
PTYTNLNR

SEQ ID NO: 95264 - protein, 9 aa, Homo sapiens
  Table A; Target 95264; HLA-A*03:01; TUBA3C; ENSG00000198033; TAA
PTYTNLNRL

SEQ ID NO: 95265 - protein, 9 aa, Homo sapiens
  Table A; Target 95265; HLA-A*31:01; TUBA3C; ENSG00000198033; TAA
PTYTNLNRL

SEQ ID NO: 95266 - protein, 9 aa, Homo sapiens
  Table A; Target 95266; HLA-A*68:02; TUBA3C; ENSG00000198033; TAA
PTYTNLNRL

SEQ ID NO: 95267 - protein, 9 aa, Homo sapiens
  Table A; Target 95267; HLA-C*06:02; TUBA3C; ENSG00000198033; TAA
PTYTNLNRL

SEQ ID NO: 95268 - protein, 9 aa, Homo sapiens
  Table A; Target 95268; HLA-C*07:02; TUBA3C; ENSG00000198033; TAA
PTYTNLNRL

SEQ ID NO: 95269 - protein, 9 aa, Homo sapiens
  Table A; Target 95269; HLA-C*16:02; TUBA3C; ENSG00000198033; TAA
PTYTNLNRL

SEQ ID NO: 95270 - protein, 10 aa, Homo sapiens
  Table A; Target 95270; HLA-C*06:02; TUBA3C; ENSG00000198033; TAA
PTYTNLNRLI

SEQ ID NO: 95271 - protein, 8 aa, Homo sapiens
  Table A; Target 95271; HLA-C*04:01; TUBA3C; ENSG00000198033; TAA
PVISAEKA

SEQ ID NO: 95272 - protein, 8 aa, Homo sapiens
  Table A; Target 95272; HLA-C*06:02; TUBA3C; ENSG00000198033; TAA
PVISAEKA

SEQ ID NO: 95273 - protein, 8 aa, Homo sapiens
  Table A; Target 95273; HLA-C*07:02; TUBA3C; ENSG00000198033; TAA
PVISAEKA

SEQ ID NO: 95274 - protein, 9 aa, Homo sapiens
  Table A; Target 95274; HLA-A*25:01; TUBA3C; ENSG00000198033; TAA
PVISAEKAY

SEQ ID NO: 95275 - protein, 9 aa, Homo sapiens
  Table A; Target 95275; HLA-A*26:01; TUBA3C; ENSG00000198033; TAA
PVISAEKAY

SEQ ID NO: 95276 - protein, 9 aa, Homo sapiens
  Table A; Target 95276; HLA-A*29:02; TUBA3C; ENSG00000198033; TAA
PVISAEKAY

SEQ ID NO: 95277 - protein, 9 aa, Homo sapiens
  Table A; Target 95277; HLA-A*30:02; TUBA3C; ENSG00000198033; TAA
PVISAEKAY

SEQ ID NO: 95278 - protein, 9 aa, Homo sapiens
  Table A; Target 95278; HLA-A*32:01; TUBA3C; ENSG00000198033; TAA
PVISAEKAY

SEQ ID NO: 95279 - protein, 9 aa, Homo sapiens
  Table A; Target 95279; HLA-B*07:02; TUBA3C; ENSG00000198033; TAA
PVISAEKAY

SEQ ID NO: 95280 - protein, 9 aa, Homo sapiens
  Table A; Target 95280; HLA-B*15:01; TUBA3C; ENSG00000198033; TAA
PVISAEKAY

SEQ ID NO: 95281 - protein, 9 aa, Homo sapiens
  Table A; Target 95281; HLA-B*15:03; TUBA3C; ENSG00000198033; TAA
PVISAEKAY

SEQ ID NO: 95282 - protein, 9 aa, Homo sapiens
  Table A; Target 95282; HLA-B*46:01; TUBA3C; ENSG00000198033; TAA
PVISAEKAY

SEQ ID NO: 95283 - protein, 9 aa, Homo sapiens
  Table A; Target 95283; HLA-C*03:03; TUBA3C; ENSG00000198033; TAA
PVISAEKAY

SEQ ID NO: 95284 - protein, 9 aa, Homo sapiens
  Table A; Target 95284; HLA-C*04:01; TUBA3C; ENSG00000198033; TAA
PVISAEKAY

SEQ ID NO: 95285 - protein, 9 aa, Homo sapiens
  Table A; Target 95285; HLA-C*06:02; TUBA3C; ENSG00000198033; TAA
PVISAEKAY

SEQ ID NO: 95286 - protein, 9 aa, Homo sapiens
  Table A; Target 95286; HLA-C*07:01; TUBA3C; ENSG00000198033; TAA
PVISAEKAY

SEQ ID NO: 95287 - protein, 9 aa, Homo sapiens
  Table A; Target 95287; HLA-C*07:02; TUBA3C; ENSG00000198033; TAA
PVISAEKAY

SEQ ID NO: 95288 - protein, 9 aa, Homo sapiens
  Table A; Target 95288; HLA-C*07:04; TUBA3C; ENSG00000198033; TAA
PVISAEKAY

SEQ ID NO: 95289 - protein, 9 aa, Homo sapiens
  Table A; Target 95289; HLA-C*12:03; TUBA3C; ENSG00000198033; TAA
PVISAEKAY

SEQ ID NO: 95290 - protein, 8 aa, Homo sapiens
  Table A; Target 95290; HLA-C*07:01; TUBA3C; ENSG00000198033; TAA
PYNSILTT

SEQ ID NO: 95291 - protein, 9 aa, Homo sapiens
  Table A; Target 95291; HLA-A*23:01; TUBA3C; ENSG00000198033; TAA
PYNSILTTH

SEQ ID NO: 95292 - protein, 9 aa, Homo sapiens
  Table A; Target 95292; HLA-A*24:02; TUBA3C; ENSG00000198033; TAA
PYNSILTTH

SEQ ID NO: 95293 - protein, 9 aa, Homo sapiens
  Table A; Target 95293; HLA-A*31:01; TUBA3C; ENSG00000198033; TAA
PYNSILTTH

SEQ ID NO: 95294 - protein, 9 aa, Homo sapiens
  Table A; Target 95294; HLA-C*04:01; TUBA3C; ENSG00000198033; TAA
PYNSILTTH

SEQ ID NO: 95295 - protein, 9 aa, Homo sapiens
  Table A; Target 95295; HLA-A*24:02; TUBA3C; ENSG00000198033; TAA
PYPRIHFPL

SEQ ID NO: 95296 - protein, 10 aa, Homo sapiens
  Table A; Target 95296; HLA-A*24:02; TUBA3C; ENSG00000198033; TAA
PYPRIHFPLA

SEQ ID NO: 95297 - protein, 8 aa, Homo sapiens
  Table A; Target 95297; HLA-C*07:01; TUBA3C; ENSG00000198033; TAA
QAGVQIGN

SEQ ID NO: 95298 - protein, 11 aa, Homo sapiens
  Table A; Target 95298; HLA-B*44:03; TUBA3C; ENSG00000198033; TAA
QAGVQIGNACW

SEQ ID NO: 95299 - protein, 9 aa, Homo sapiens
  Table A; Target 95299; HLA-A*02:04; TUBA3C; ENSG00000198033; TAA
QGFLIFHSF

SEQ ID NO: 95300 - protein, 9 aa, Homo sapiens
  Table A; Target 95300; HLA-A*02:07; TUBA3C; ENSG00000198033; TAA
QGFLIFHSF

SEQ ID NO: 95301 - protein, 9 aa, Homo sapiens
  Table A; Target 95301; HLA-A*23:01; TUBA3C; ENSG00000198033; TAA
QGFLIFHSF

SEQ ID NO: 95302 - protein, 9 aa, Homo sapiens
  Table A; Target 95302; HLA-A*24:02; TUBA3C; ENSG00000198033; TAA
QGFLIFHSF

SEQ ID NO: 95303 - protein, 9 aa, Homo sapiens
  Table A; Target 95303; HLA-A*29:02; TUBA3C; ENSG00000198033; TAA
QGFLIFHSF

SEQ ID NO: 95304 - protein, 9 aa, Homo sapiens
  Table A; Target 95304; HLA-A*30:01; TUBA3C; ENSG00000198033; TAA
QGFLIFHSF

SEQ ID NO: 95305 - protein, 9 aa, Homo sapiens
  Table A; Target 95305; HLA-A*30:02; TUBA3C; ENSG00000198033; TAA
QGFLIFHSF

SEQ ID NO: 95306 - protein, 9 aa, Homo sapiens
  Table A; Target 95306; HLA-A*31:01; TUBA3C; ENSG00000198033; TAA
QGFLIFHSF

SEQ ID NO: 95307 - protein, 9 aa, Homo sapiens
  Table A; Target 95307; HLA-A*33:01; TUBA3C; ENSG00000198033; TAA
QGFLIFHSF

SEQ ID NO: 95308 - protein, 9 aa, Homo sapiens
  Table A; Target 95308; HLA-A*68:02; TUBA3C; ENSG00000198033; TAA
QGFLIFHSF

SEQ ID NO: 95309 - protein, 9 aa, Homo sapiens
  Table A; Target 95309; HLA-B*08:01; TUBA3C; ENSG00000198033; TAA
QGFLIFHSF

SEQ ID NO: 95310 - protein, 9 aa, Homo sapiens
  Table A; Target 95310; HLA-B*15:03; TUBA3C; ENSG00000198033; TAA
QGFLIFHSF

SEQ ID NO: 95311 - protein, 9 aa, Homo sapiens
  Table A; Target 95311; HLA-B*18:01; TUBA3C; ENSG00000198033; TAA
QGFLIFHSF

SEQ ID NO: 95312 - protein, 9 aa, Homo sapiens
  Table A; Target 95312; HLA-B*27:02; TUBA3C; ENSG00000198033; TAA
QGFLIFHSF

SEQ ID NO: 95313 - protein, 9 aa, Homo sapiens
  Table A; Target 95313; HLA-B*35:01; TUBA3C; ENSG00000198033; TAA
QGFLIFHSF

SEQ ID NO: 95314 - protein, 9 aa, Homo sapiens
  Table A; Target 95314; HLA-B*37:01; TUBA3C; ENSG00000198033; TAA
QGFLIFHSF

SEQ ID NO: 95315 - protein, 9 aa, Homo sapiens
  Table A; Target 95315; HLA-B*40:02; TUBA3C; ENSG00000198033; TAA
QGFLIFHSF

SEQ ID NO: 95316 - protein, 9 aa, Homo sapiens
  Table A; Target 95316; HLA-B*44:02; TUBA3C; ENSG00000198033; TAA
QGFLIFHSF

SEQ ID NO: 95317 - protein, 9 aa, Homo sapiens
  Table A; Target 95317; HLA-B*44:03; TUBA3C; ENSG00000198033; TAA
QGFLIFHSF

SEQ ID NO: 95318 - protein, 9 aa, Homo sapiens
  Table A; Target 95318; HLA-B*51:01; TUBA3C; ENSG00000198033; TAA
QGFLIFHSF

SEQ ID NO: 95319 - protein, 9 aa, Homo sapiens
  Table A; Target 95319; HLA-B*54:01; TUBA3C; ENSG00000198033; TAA
QGFLIFHSF

SEQ ID NO: 95320 - protein, 9 aa, Homo sapiens
  Table A; Target 95320; HLA-B*57:01; TUBA3C; ENSG00000198033; TAA
QGFLIFHSF

SEQ ID NO: 95321 - protein, 9 aa, Homo sapiens
  Table A; Target 95321; HLA-C*02:02; TUBA3C; ENSG00000198033; TAA
QGFLIFHSF

SEQ ID NO: 95322 - protein, 9 aa, Homo sapiens
  Table A; Target 95322; HLA-C*07:01; TUBA3C; ENSG00000198033; TAA
QGFLIFHSF

SEQ ID NO: 95323 - protein, 9 aa, Homo sapiens
  Table A; Target 95323; HLA-C*12:03; TUBA3C; ENSG00000198033; TAA
QGFLIFHSF

SEQ ID NO: 95324 - protein, 9 aa, Homo sapiens
  Table A; Target 95324; HLA-C*16:04; TUBA3C; ENSG00000198033; TAA
QGFLIFHSF

SEQ ID NO: 95325 - protein, 10 aa, Homo sapiens
  Table A; Target 95325; HLA-A*01:01; TUBA3C; ENSG00000198033; TAA
QIGNACWELY

SEQ ID NO: 95326 - protein, 10 aa, Homo sapiens
  Table A; Target 95326; HLA-C*07:01; TUBA3C; ENSG00000198033; TAA
QIGNACWELY

SEQ ID NO: 95327 - protein, 8 aa, Homo sapiens
  Table A; Target 95327; HLA-B*54:01; TUBA3C; ENSG00000198033; TAA
QIVSSITA

SEQ ID NO: 95328 - protein, 8 aa, Homo sapiens
  Table A; Target 95328; HLA-B*56:01; TUBA3C; ENSG00000198033; TAA
QIVSSITA

SEQ ID NO: 95329 - protein, 10 aa, Homo sapiens
  Table A; Target 95329; HLA-A*23:01; TUBA3C; ENSG00000198033; TAA
QIVSSITASL

SEQ ID NO: 95330 - protein, 10 aa, Homo sapiens
  Table A; Target 95330; HLA-A*25:01; TUBA3C; ENSG00000198033; TAA
QIVSSITASL

SEQ ID NO: 95331 - protein, 10 aa, Homo sapiens
  Table A; Target 95331; HLA-A*26:01; TUBA3C; ENSG00000198033; TAA
QIVSSITASL

SEQ ID NO: 95332 - protein, 10 aa, Homo sapiens
  Table A; Target 95332; HLA-A*30:01; TUBA3C; ENSG00000198033; TAA
QIVSSITASL

SEQ ID NO: 95333 - protein, 10 aa, Homo sapiens
  Table A; Target 95333; HLA-A*68:02; TUBA3C; ENSG00000198033; TAA
QIVSSITASL

SEQ ID NO: 95334 - protein, 10 aa, Homo sapiens
  Table A; Target 95334; HLA-B*07:02; TUBA3C; ENSG00000198033; TAA
QIVSSITASL

SEQ ID NO: 95335 - protein, 10 aa, Homo sapiens
  Table A; Target 95335; HLA-B*40:01; TUBA3C; ENSG00000198033; TAA
QIVSSITASL

SEQ ID NO: 95336 - protein, 10 aa, Homo sapiens
  Table A; Target 95336; HLA-B*40:02; TUBA3C; ENSG00000198033; TAA
QIVSSITASL

SEQ ID NO: 95337 - protein, 10 aa, Homo sapiens
  Table A; Target 95337; HLA-B*46:01; TUBA3C; ENSG00000198033; TAA
QIVSSITASL

SEQ ID NO: 95338 - protein, 10 aa, Homo sapiens
  Table A; Target 95338; HLA-C*01:02; TUBA3C; ENSG00000198033; TAA
QIVSSITASL

SEQ ID NO: 95339 - protein, 10 aa, Homo sapiens
  Table A; Target 95339; HLA-C*03:03; TUBA3C; ENSG00000198033; TAA
QIVSSITASL

SEQ ID NO: 95340 - protein, 10 aa, Homo sapiens
  Table A; Target 95340; HLA-C*03:04; TUBA3C; ENSG00000198033; TAA
QIVSSITASL

SEQ ID NO: 95341 - protein, 11 aa, Homo sapiens
  Table A; Target 95341; HLA-A*31:01; TUBA3C; ENSG00000198033; TAA
QIVSSITASLR

SEQ ID NO: 95342 - protein, 11 aa, Homo sapiens
  Table A; Target 95342; HLA-A*33:03; TUBA3C; ENSG00000198033; TAA
QIVSSITASLR

SEQ ID NO: 95343 - protein, 11 aa, Homo sapiens
  Table A; Target 95343; HLA-A*68:01; TUBA3C; ENSG00000198033; TAA
QIVSSITASLR

SEQ ID NO: 95344 - protein, 11 aa, Homo sapiens
  Table A; Target 95344; HLA-B*27:02; TUBA3C; ENSG00000198033; TAA
QIVSSITASLR

SEQ ID NO: 95345 - protein, 11 aa, Homo sapiens
  Table A; Target 95345; HLA-C*07:06; TUBA3C; ENSG00000198033; TAA
QIVSSITASLR

SEQ ID NO: 95346 - protein, 8 aa, Homo sapiens
  Table A; Target 95346; HLA-A*02:03; TUBA3C; ENSG00000198033; TAA
QLFHPEQL

SEQ ID NO: 95347 - protein, 8 aa, Homo sapiens
  Table A; Target 95347; HLA-A*02:04; TUBA3C; ENSG00000198033; TAA
QLFHPEQL

SEQ ID NO: 95348 - protein, 9 aa, Homo sapiens
  Table A; Target 95348; HLA-A*02:01; TUBA3C; ENSG00000198033; TAA
QLFHPEQLI

SEQ ID NO: 95349 - protein, 9 aa, Homo sapiens
  Table A; Target 95349; HLA-A*02:03; TUBA3C; ENSG00000198033; TAA
QLFHPEQLI

SEQ ID NO: 95350 - protein, 9 aa, Homo sapiens
  Table A; Target 95350; HLA-A*02:04; TUBA3C; ENSG00000198033; TAA
QLFHPEQLI

SEQ ID NO: 95351 - protein, 9 aa, Homo sapiens
  Table A; Target 95351; HLA-A*02:07; TUBA3C; ENSG00000198033; TAA
QLFHPEQLI

SEQ ID NO: 95352 - protein, 9 aa, Homo sapiens
  Table A; Target 95352; HLA-A*24:02; TUBA3C; ENSG00000198033; TAA
QLFHPEQLI

SEQ ID NO: 95353 - protein, 9 aa, Homo sapiens
  Table A; Target 95353; HLA-A*68:02; TUBA3C; ENSG00000198033; TAA
QLFHPEQLI

SEQ ID NO: 95354 - protein, 9 aa, Homo sapiens
  Table A; Target 95354; HLA-B*13:02; TUBA3C; ENSG00000198033; TAA
QLFHPEQLI

SEQ ID NO: 95355 - protein, 9 aa, Homo sapiens
  Table A; Target 95355; HLA-B*38:01; TUBA3C; ENSG00000198033; TAA
QLFHPEQLI

SEQ ID NO: 95356 - protein, 9 aa, Homo sapiens
  Table A; Target 95356; HLA-B*51:01; TUBA3C; ENSG00000198033; TAA
QLFHPEQLI

SEQ ID NO: 95357 - protein, 9 aa, Homo sapiens
  Table A; Target 95357; HLA-B*57:01; TUBA3C; ENSG00000198033; TAA
QLFHPEQLI

SEQ ID NO: 95358 - protein, 10 aa, Homo sapiens
  Table A; Target 95358; HLA-C*07:01; TUBA3C; ENSG00000198033; TAA
QLFHPEQLIT

SEQ ID NO: 95359 - protein, 11 aa, Homo sapiens
  Table A; Target 95359; HLA-A*02:03; TUBA3C; ENSG00000198033; TAA
QLFHPEQLITG

SEQ ID NO: 95360 - protein, 11 aa, Homo sapiens
  Table A; Target 95360; HLA-A*02:04; TUBA3C; ENSG00000198033; TAA
QLFHPEQLITG

SEQ ID NO: 95361 - protein, 11 aa, Homo sapiens
  Table A; Target 95361; HLA-A*02:07; TUBA3C; ENSG00000198033; TAA
QLFHPEQLITG

SEQ ID NO: 95362 - protein, 11 aa, Homo sapiens
  Table A; Target 95362; HLA-A*68:02; TUBA3C; ENSG00000198033; TAA
QLFHPEQLITG

SEQ ID NO: 95363 - protein, 10 aa, Homo sapiens
  Table A; Target 95363; HLA-A*02:01; TUBA3C; ENSG00000198033; TAA
QLITGKEDAA

SEQ ID NO: 95364 - protein, 10 aa, Homo sapiens
  Table A; Target 95364; HLA-A*02:03; TUBA3C; ENSG00000198033; TAA
QLSVAEITNA

SEQ ID NO: 95365 - protein, 10 aa, Homo sapiens
  Table A; Target 95365; HLA-B*27:02; TUBA3C; ENSG00000198033; TAA
QPDGQMPSDK

SEQ ID NO: 95366 - protein, 8 aa, Homo sapiens
  Table A; Target 95366; HLA-C*07:01; TUBA3C; ENSG00000198033; TAA
QPPTVVPG

SEQ ID NO: 95367 - protein, 9 aa, Homo sapiens
  Table A; Target 95367; HLA-B*51:01; TUBA3C; ENSG00000198033; TAA
QPPTVVPGG

SEQ ID NO: 95368 - protein, 9 aa, Homo sapiens
  Table A; Target 95368; HLA-C*07:01; TUBA3C; ENSG00000198033; TAA
QPPTVVPGG

SEQ ID NO: 95369 - protein, 9 aa, Homo sapiens
  Table A; Target 95369; HLA-C*07:02; TUBA3C; ENSG00000198033; TAA
QPPTVVPGG

SEQ ID NO: 95370 - protein, 11 aa, Homo sapiens
  Table A; Target 95370; HLA-B*07:02; TUBA3C; ENSG00000198033; TAA
QPPTVVPGGDL

SEQ ID NO: 95371 - protein, 11 aa, Homo sapiens
  Table A; Target 95371; HLA-C*04:01; TUBA3C; ENSG00000198033; TAA
QPPTVVPGGDL

SEQ ID NO: 95372 - protein, 11 aa, Homo sapiens
  Table A; Target 95372; HLA-C*07:02; TUBA3C; ENSG00000198033; TAA
QPPTVVPGGDL

SEQ ID NO: 95373 - protein, 8 aa, Homo sapiens
  Table A; Target 95373; HLA-C*04:01; TUBA3C; ENSG00000198033; TAA
QTNLVPYP

SEQ ID NO: 95374 - protein, 9 aa, Homo sapiens
  Table A; Target 95374; HLA-A*03:01; TUBA3C; ENSG00000198033; TAA
QTNLVPYPR

SEQ ID NO: 95375 - protein, 9 aa, Homo sapiens
  Table A; Target 95375; HLA-A*03:02; TUBA3C; ENSG00000198033; TAA
QTNLVPYPR

SEQ ID NO: 95376 - protein, 9 aa, Homo sapiens
  Table A; Target 95376; HLA-A*11:01; TUBA3C; ENSG00000198033; TAA
QTNLVPYPR

SEQ ID NO: 95377 - protein, 9 aa, Homo sapiens
  Table A; Target 95377; HLA-A*31:01; TUBA3C; ENSG00000198033; TAA
QTNLVPYPR

SEQ ID NO: 95378 - protein, 9 aa, Homo sapiens
  Table A; Target 95378; HLA-A*33:01; TUBA3C; ENSG00000198033; TAA
QTNLVPYPR

SEQ ID NO: 95379 - protein, 9 aa, Homo sapiens
  Table A; Target 95379; HLA-A*33:03; TUBA3C; ENSG00000198033; TAA
QTNLVPYPR

SEQ ID NO: 95380 - protein, 9 aa, Homo sapiens
  Table A; Target 95380; HLA-A*68:01; TUBA3C; ENSG00000198033; TAA
QTNLVPYPR

SEQ ID NO: 95381 - protein, 9 aa, Homo sapiens
  Table A; Target 95381; HLA-A*68:02; TUBA3C; ENSG00000198033; TAA
QTNLVPYPR

SEQ ID NO: 95382 - protein, 9 aa, Homo sapiens
  Table A; Target 95382; HLA-B*27:02; TUBA3C; ENSG00000198033; TAA
QTNLVPYPR

SEQ ID NO: 95383 - protein, 9 aa, Homo sapiens
  Table A; Target 95383; HLA-B*57:01; TUBA3C; ENSG00000198033; TAA
QTNLVPYPR

SEQ ID NO: 95384 - protein, 9 aa, Homo sapiens
  Table A; Target 95384; HLA-C*06:02; TUBA3C; ENSG00000198033; TAA
QTNLVPYPR

SEQ ID NO: 95385 - protein, 9 aa, Homo sapiens
  Table A; Target 95385; HLA-C*07:06; TUBA3C; ENSG00000198033; TAA
QTNLVPYPR

SEQ ID NO: 95386 - protein, 9 aa, Homo sapiens
  Table A; Target 95386; HLA-B*27:05; TUBA3C; ENSG00000198033; TAA
QVSTAVVEP

SEQ ID NO: 95387 - protein, 9 aa, Homo sapiens
  Table A; Target 95387; HLA-C*07:04; TUBA3C; ENSG00000198033; TAA
QVSTAVVEP

SEQ ID NO: 95388 - protein, 10 aa, Homo sapiens
  Table A; Target 95388; HLA-A*01:01; TUBA3C; ENSG00000198033; TAA
QVSTAVVEPY

SEQ ID NO: 95389 - protein, 10 aa, Homo sapiens
  Table A; Target 95389; HLA-A*03:01; TUBA3C; ENSG00000198033; TAA
QVSTAVVEPY

SEQ ID NO: 95390 - protein, 10 aa, Homo sapiens
  Table A; Target 95390; HLA-A*03:02; TUBA3C; ENSG00000198033; TAA
QVSTAVVEPY

SEQ ID NO: 95391 - protein, 10 aa, Homo sapiens
  Table A; Target 95391; HLA-A*25:01; TUBA3C; ENSG00000198033; TAA
QVSTAVVEPY

SEQ ID NO: 95392 - protein, 10 aa, Homo sapiens
  Table A; Target 95392; HLA-A*26:01; TUBA3C; ENSG00000198033; TAA
QVSTAVVEPY

SEQ ID NO: 95393 - protein, 10 aa, Homo sapiens
  Table A; Target 95393; HLA-A*29:02; TUBA3C; ENSG00000198033; TAA
QVSTAVVEPY

SEQ ID NO: 95394 - protein, 10 aa, Homo sapiens
  Table A; Target 95394; HLA-A*30:02; TUBA3C; ENSG00000198033; TAA
QVSTAVVEPY

SEQ ID NO: 95395 - protein, 10 aa, Homo sapiens
  Table A; Target 95395; HLA-A*68:01; TUBA3C; ENSG00000198033; TAA
QVSTAVVEPY

SEQ ID NO: 95396 - protein, 10 aa, Homo sapiens
  Table A; Target 95396; HLA-B*07:02; TUBA3C; ENSG00000198033; TAA
QVSTAVVEPY

SEQ ID NO: 95397 - protein, 10 aa, Homo sapiens
  Table A; Target 95397; HLA-B*15:01; TUBA3C; ENSG00000198033; TAA
QVSTAVVEPY

SEQ ID NO: 95398 - protein, 10 aa, Homo sapiens
  Table A; Target 95398; HLA-B*27:02; TUBA3C; ENSG00000198033; TAA
QVSTAVVEPY

SEQ ID NO: 95399 - protein, 10 aa, Homo sapiens
  Table A; Target 95399; HLA-B*35:01; TUBA3C; ENSG00000198033; TAA
QVSTAVVEPY

SEQ ID NO: 95400 - protein, 10 aa, Homo sapiens
  Table A; Target 95400; HLA-B*57:01; TUBA3C; ENSG00000198033; TAA
QVSTAVVEPY

SEQ ID NO: 95401 - protein, 10 aa, Homo sapiens
  Table A; Target 95401; HLA-C*03:03; TUBA3C; ENSG00000198033; TAA
QVSTAVVEPY

SEQ ID NO: 95402 - protein, 10 aa, Homo sapiens
  Table A; Target 95402; HLA-C*04:01; TUBA3C; ENSG00000198033; TAA
QVSTAVVEPY

SEQ ID NO: 95403 - protein, 10 aa, Homo sapiens
  Table A; Target 95403; HLA-C*06:02; TUBA3C; ENSG00000198033; TAA
QVSTAVVEPY

SEQ ID NO: 95404 - protein, 10 aa, Homo sapiens
  Table A; Target 95404; HLA-C*07:01; TUBA3C; ENSG00000198033; TAA
QVSTAVVEPY

SEQ ID NO: 95405 - protein, 10 aa, Homo sapiens
  Table A; Target 95405; HLA-C*07:04; TUBA3C; ENSG00000198033; TAA
QVSTAVVEPY

SEQ ID NO: 95406 - protein, 10 aa, Homo sapiens
  Table A; Target 95406; HLA-C*07:06; TUBA3C; ENSG00000198033; TAA
QVSTAVVEPY

SEQ ID NO: 95407 - protein, 10 aa, Homo sapiens
  Table A; Target 95407; HLA-C*16:04; TUBA3C; ENSG00000198033; TAA
QVSTAVVEPY

SEQ ID NO: 95408 - protein, 8 aa, Homo sapiens
  Table A; Target 95408; HLA-A*02:04; TUBA3C; ENSG00000198033; TAA
RAFVHWYV

SEQ ID NO: 95409 - protein, 8 aa, Homo sapiens
  Table A; Target 95409; HLA-B*57:01; TUBA3C; ENSG00000198033; TAA
RAFVHWYV

SEQ ID NO: 95410 - protein, 8 aa, Homo sapiens
  Table A; Target 95410; HLA-B*37:01; TUBA3C; ENSG00000198033; TAA
RECISIHV

SEQ ID NO: 95411 - protein, 8 aa, Homo sapiens
  Table A; Target 95411; HLA-B*49:01; TUBA3C; ENSG00000198033; TAA
RECISIHV

SEQ ID NO: 95412 - protein, 9 aa, Homo sapiens
  Table A; Target 95412; HLA-A*01:01; TUBA3C; ENSG00000198033; TAA
REDLAALEK

SEQ ID NO: 95413 - protein, 11 aa, Homo sapiens
  Table A; Target 95413; HLA-B*44:02; TUBA3C; ENSG00000198033; TAA
REDLAALEKDY

SEQ ID NO: 95414 - protein, 11 aa, Homo sapiens
  Table A; Target 95414; HLA-B*44:03; TUBA3C; ENSG00000198033; TAA
REDLAALEKDY

SEQ ID NO: 95415 - protein, 11 aa, Homo sapiens
  Table A; Target 95415; HLA-C*16:04; TUBA3C; ENSG00000198033; TAA
REDLAALEKDY

SEQ ID NO: 95416 - protein, 8 aa, Homo sapiens
  Table A; Target 95416; HLA-C*04:01; TUBA3C; ENSG00000198033; TAA
RFDGALNV

SEQ ID NO: 95417 - protein, 10 aa, Homo sapiens
  Table A; Target 95417; HLA-A*23:01; TUBA3C; ENSG00000198033; TAA
RFDGALNVDL

SEQ ID NO: 95418 - protein, 10 aa, Homo sapiens
  Table A; Target 95418; HLA-B*35:01; TUBA3C; ENSG00000198033; TAA
RFDGALNVDL

SEQ ID NO: 95419 - protein, 10 aa, Homo sapiens
  Table A; Target 95419; HLA-B*35:03; TUBA3C; ENSG00000198033; TAA
RFDGALNVDL

SEQ ID NO: 95420 - protein, 10 aa, Homo sapiens
  Table A; Target 95420; HLA-B*55:01; TUBA3C; ENSG00000198033; TAA
RFDGALNVDL

SEQ ID NO: 95421 - protein, 10 aa, Homo sapiens
  Table A; Target 95421; HLA-C*04:01; TUBA3C; ENSG00000198033; TAA
RFDGALNVDL

SEQ ID NO: 95422 - protein, 9 aa, Homo sapiens
  Table A; Target 95422; HLA-C*04:01; TUBA3C; ENSG00000198033; TAA
RGDVVPKDV

SEQ ID NO: 95423 - protein, 8 aa, Homo sapiens
  Table A; Target 95423; HLA-A*03:01; TUBA3C; ENSG00000198033; TAA
RGHYTIGK

SEQ ID NO: 95424 - protein, 8 aa, Homo sapiens
  Table A; Target 95424; HLA-A*03:02; TUBA3C; ENSG00000198033; TAA
RGHYTIGK

SEQ ID NO: 95425 - protein, 8 aa, Homo sapiens
  Table A; Target 95425; HLA-C*06:02; TUBA3C; ENSG00000198033; TAA
RGHYTIGK

SEQ ID NO: 95426 - protein, 9 aa, Homo sapiens
  Table A; Target 95426; HLA-A*03:01; TUBA3C; ENSG00000198033; TAA
RIHFPLATY

SEQ ID NO: 95427 - protein, 9 aa, Homo sapiens
  Table A; Target 95427; HLA-A*29:02; TUBA3C; ENSG00000198033; TAA
RIHFPLATY

SEQ ID NO: 95428 - protein, 9 aa, Homo sapiens
  Table A; Target 95428; HLA-A*30:02; TUBA3C; ENSG00000198033; TAA
RIHFPLATY

SEQ ID NO: 95429 - protein, 9 aa, Homo sapiens
  Table A; Target 95429; HLA-A*31:01; TUBA3C; ENSG00000198033; TAA
RIHFPLATY

SEQ ID NO: 95430 - protein, 9 aa, Homo sapiens
  Table A; Target 95430; HLA-A*32:01; TUBA3C; ENSG00000198033; TAA
RIHFPLATY

SEQ ID NO: 95431 - protein, 9 aa, Homo sapiens
  Table A; Target 95431; HLA-B*15:01; TUBA3C; ENSG00000198033; TAA
RIHFPLATY

SEQ ID NO: 95432 - protein, 9 aa, Homo sapiens
  Table A; Target 95432; HLA-B*46:01; TUBA3C; ENSG00000198033; TAA
RIHFPLATY

SEQ ID NO: 95433 - protein, 9 aa, Homo sapiens
  Table A; Target 95433; HLA-B*57:01; TUBA3C; ENSG00000198033; TAA
RIHFPLATY

SEQ ID NO: 95434 - protein, 9 aa, Homo sapiens
  Table A; Target 95434; HLA-A*01:01; TUBA3C; ENSG00000198033; TAA
RLDHKFDLM

SEQ ID NO: 95435 - protein, 9 aa, Homo sapiens
  Table A; Target 95435; HLA-A*02:07; TUBA3C; ENSG00000198033; TAA
RLDHKFDLM

SEQ ID NO: 95436 - protein, 10 aa, Homo sapiens
  Table A; Target 95436; HLA-A*01:01; TUBA3C; ENSG00000198033; TAA
RLDHKFDLMY

SEQ ID NO: 95437 - protein, 10 aa, Homo sapiens
  Table A; Target 95437; HLA-A*03:01; TUBA3C; ENSG00000198033; TAA
RLDHKFDLMY

SEQ ID NO: 95438 - protein, 10 aa, Homo sapiens
  Table A; Target 95438; HLA-A*29:02; TUBA3C; ENSG00000198033; TAA
RLDHKFDLMY

SEQ ID NO: 95439 - protein, 9 aa, Homo sapiens
  Table A; Target 95439; HLA-A*02:01; TUBA3C; ENSG00000198033; TAA
RLIGQIVSS

SEQ ID NO: 95440 - protein, 9 aa, Homo sapiens
  Table A; Target 95440; HLA-A*02:03; TUBA3C; ENSG00000198033; TAA
RLIGQIVSS

SEQ ID NO: 95441 - protein, 9 aa, Homo sapiens
  Table A; Target 95441; HLA-A*02:04; TUBA3C; ENSG00000198033; TAA
RLIGQIVSS

SEQ ID NO: 95442 - protein, 9 aa, Homo sapiens
  Table A; Target 95442; HLA-B*55:01; TUBA3C; ENSG00000198033; TAA
RLIGQIVSS

SEQ ID NO: 95443 - protein, 10 aa, Homo sapiens
  Table A; Target 95443; HLA-A*02:01; TUBA3C; ENSG00000198033; TAA
RLIGQIVSSI

SEQ ID NO: 95444 - protein, 10 aa, Homo sapiens
  Table A; Target 95444; HLA-A*02:03; TUBA3C; ENSG00000198033; TAA
RLIGQIVSSI

SEQ ID NO: 95445 - protein, 10 aa, Homo sapiens
  Table A; Target 95445; HLA-A*02:04; TUBA3C; ENSG00000198033; TAA
RLIGQIVSSI

SEQ ID NO: 95446 - protein, 10 aa, Homo sapiens
  Table A; Target 95446; HLA-A*02:07; TUBA3C; ENSG00000198033; TAA
RLIGQIVSSI

SEQ ID NO: 95447 - protein, 10 aa, Homo sapiens
  Table A; Target 95447; HLA-A*03:01; TUBA3C; ENSG00000198033; TAA
RLIGQIVSSI

SEQ ID NO: 95448 - protein, 10 aa, Homo sapiens
  Table A; Target 95448; HLA-A*03:02; TUBA3C; ENSG00000198033; TAA
RLIGQIVSSI

SEQ ID NO: 95449 - protein, 10 aa, Homo sapiens
  Table A; Target 95449; HLA-A*23:01; TUBA3C; ENSG00000198033; TAA
RLIGQIVSSI

SEQ ID NO: 95450 - protein, 10 aa, Homo sapiens
  Table A; Target 95450; HLA-A*24:02; TUBA3C; ENSG00000198033; TAA
RLIGQIVSSI

SEQ ID NO: 95451 - protein, 10 aa, Homo sapiens
  Table A; Target 95451; HLA-A*25:01; TUBA3C; ENSG00000198033; TAA
RLIGQIVSSI

SEQ ID NO: 95452 - protein, 10 aa, Homo sapiens
  Table A; Target 95452; HLA-A*30:01; TUBA3C; ENSG00000198033; TAA
RLIGQIVSSI

SEQ ID NO: 95453 - protein, 10 aa, Homo sapiens
  Table A; Target 95453; HLA-A*31:01; TUBA3C; ENSG00000198033; TAA
RLIGQIVSSI

SEQ ID NO: 95454 - protein, 10 aa, Homo sapiens
  Table A; Target 95454; HLA-A*32:01; TUBA3C; ENSG00000198033; TAA
RLIGQIVSSI

SEQ ID NO: 95455 - protein, 10 aa, Homo sapiens
  Table A; Target 95455; HLA-A*68:02; TUBA3C; ENSG00000198033; TAA
RLIGQIVSSI

SEQ ID NO: 95456 - protein, 10 aa, Homo sapiens
  Table A; Target 95456; HLA-B*13:02; TUBA3C; ENSG00000198033; TAA
RLIGQIVSSI

SEQ ID NO: 95457 - protein, 10 aa, Homo sapiens
  Table A; Target 95457; HLA-B*15:01; TUBA3C; ENSG00000198033; TAA
RLIGQIVSSI

SEQ ID NO: 95458 - protein, 10 aa, Homo sapiens
  Table A; Target 95458; HLA-B*15:03; TUBA3C; ENSG00000198033; TAA
RLIGQIVSSI

SEQ ID NO: 95459 - protein, 10 aa, Homo sapiens
  Table A; Target 95459; HLA-B*40:02; TUBA3C; ENSG00000198033; TAA
RLIGQIVSSI

SEQ ID NO: 95460 - protein, 10 aa, Homo sapiens
  Table A; Target 95460; HLA-B*46:01; TUBA3C; ENSG00000198033; TAA
RLIGQIVSSI

SEQ ID NO: 95461 - protein, 10 aa, Homo sapiens
  Table A; Target 95461; HLA-B*55:01; TUBA3C; ENSG00000198033; TAA
RLIGQIVSSI

SEQ ID NO: 95462 - protein, 10 aa, Homo sapiens
  Table A; Target 95462; HLA-B*58:01; TUBA3C; ENSG00000198033; TAA
RLIGQIVSSI

SEQ ID NO: 95463 - protein, 10 aa, Homo sapiens
  Table A; Target 95463; HLA-C*01:02; TUBA3C; ENSG00000198033; TAA
RLIGQIVSSI

SEQ ID NO: 95464 - protein, 10 aa, Homo sapiens
  Table A; Target 95464; HLA-C*02:02; TUBA3C; ENSG00000198033; TAA
RLIGQIVSSI

SEQ ID NO: 95465 - protein, 10 aa, Homo sapiens
  Table A; Target 95465; HLA-C*04:01; TUBA3C; ENSG00000198033; TAA
RLIGQIVSSI

SEQ ID NO: 95466 - protein, 10 aa, Homo sapiens
  Table A; Target 95466; HLA-C*06:02; TUBA3C; ENSG00000198033; TAA
RLIGQIVSSI

SEQ ID NO: 95467 - protein, 10 aa, Homo sapiens
  Table A; Target 95467; HLA-C*07:01; TUBA3C; ENSG00000198033; TAA
RLIGQIVSSI

SEQ ID NO: 95468 - protein, 10 aa, Homo sapiens
  Table A; Target 95468; HLA-C*07:02; TUBA3C; ENSG00000198033; TAA
RLIGQIVSSI

SEQ ID NO: 95469 - protein, 10 aa, Homo sapiens
  Table A; Target 95469; HLA-C*07:04; TUBA3C; ENSG00000198033; TAA
RLIGQIVSSI

SEQ ID NO: 95470 - protein, 11 aa, Homo sapiens
  Table A; Target 95470; HLA-C*04:01; TUBA3C; ENSG00000198033; TAA
RLIGQIVSSIT

SEQ ID NO: 95471 - protein, 11 aa, Homo sapiens
  Table A; Target 95471; HLA-C*06:02; TUBA3C; ENSG00000198033; TAA
RLIGQIVSSIT

SEQ ID NO: 95472 - protein, 8 aa, Homo sapiens
  Table A; Target 95472; HLA-A*03:02; TUBA3C; ENSG00000198033; TAA
RLSVDYGK

SEQ ID NO: 95473 - protein, 9 aa, Homo sapiens
  Table A; Target 95473; HLA-A*03:01; TUBA3C; ENSG00000198033; TAA
RLSVDYGKK

SEQ ID NO: 95474 - protein, 9 aa, Homo sapiens
  Table A; Target 95474; HLA-A*03:02; TUBA3C; ENSG00000198033; TAA
RLSVDYGKK

SEQ ID NO: 95475 - protein, 10 aa, Homo sapiens
  Table A; Target 95475; HLA-A*03:01; TUBA3C; ENSG00000198033; TAA
RNLDIERPTY

SEQ ID NO: 95476 - protein, 10 aa, Homo sapiens
  Table A; Target 95476; HLA-A*23:01; TUBA3C; ENSG00000198033; TAA
RNLDIERPTY

SEQ ID NO: 95477 - protein, 10 aa, Homo sapiens
  Table A; Target 95477; HLA-A*24:02; TUBA3C; ENSG00000198033; TAA
RNLDIERPTY

SEQ ID NO: 95478 - protein, 10 aa, Homo sapiens
  Table A; Target 95478; HLA-A*29:02; TUBA3C; ENSG00000198033; TAA
RNLDIERPTY

SEQ ID NO: 95479 - protein, 10 aa, Homo sapiens
  Table A; Target 95479; HLA-A*30:02; TUBA3C; ENSG00000198033; TAA
RNLDIERPTY

SEQ ID NO: 95480 - protein, 10 aa, Homo sapiens
  Table A; Target 95480; HLA-A*31:01; TUBA3C; ENSG00000198033; TAA
RNLDIERPTY

SEQ ID NO: 95481 - protein, 10 aa, Homo sapiens
  Table A; Target 95481; HLA-A*32:01; TUBA3C; ENSG00000198033; TAA
RNLDIERPTY

SEQ ID NO: 95482 - protein, 10 aa, Homo sapiens
  Table A; Target 95482; HLA-B*07:02; TUBA3C; ENSG00000198033; TAA
RNLDIERPTY

SEQ ID NO: 95483 - protein, 10 aa, Homo sapiens
  Table A; Target 95483; HLA-B*15:01; TUBA3C; ENSG00000198033; TAA
RNLDIERPTY

SEQ ID NO: 95484 - protein, 10 aa, Homo sapiens
  Table A; Target 95484; HLA-B*15:03; TUBA3C; ENSG00000198033; TAA
RNLDIERPTY

SEQ ID NO: 95485 - protein, 10 aa, Homo sapiens
  Table A; Target 95485; HLA-B*27:05; TUBA3C; ENSG00000198033; TAA
RNLDIERPTY

SEQ ID NO: 95486 - protein, 10 aa, Homo sapiens
  Table A; Target 95486; HLA-B*44:02; TUBA3C; ENSG00000198033; TAA
RNLDIERPTY

SEQ ID NO: 95487 - protein, 10 aa, Homo sapiens
  Table A; Target 95487; HLA-B*44:03; TUBA3C; ENSG00000198033; TAA
RNLDIERPTY

SEQ ID NO: 95488 - protein, 10 aa, Homo sapiens
  Table A; Target 95488; HLA-B*57:01; TUBA3C; ENSG00000198033; TAA
RNLDIERPTY

SEQ ID NO: 95489 - protein, 10 aa, Homo sapiens
  Table A; Target 95489; HLA-B*58:01; TUBA3C; ENSG00000198033; TAA
RNLDIERPTY

SEQ ID NO: 95490 - protein, 10 aa, Homo sapiens
  Table A; Target 95490; HLA-C*07:01; TUBA3C; ENSG00000198033; TAA
RNLDIERPTY

SEQ ID NO: 95491 - protein, 10 aa, Homo sapiens
  Table A; Target 95491; HLA-C*12:03; TUBA3C; ENSG00000198033; TAA
RNLDIERPTY

SEQ ID NO: 95492 - protein, 10 aa, Homo sapiens
  Table A; Target 95492; HLA-C*16:01; TUBA3C; ENSG00000198033; TAA
RNLDIERPTY

SEQ ID NO: 95493 - protein, 10 aa, Homo sapiens
  Table A; Target 95493; HLA-C*16:04; TUBA3C; ENSG00000198033; TAA
RNLDIERPTY

SEQ ID NO: 95494 - protein, 9 aa, Homo sapiens
  Table A; Target 95494; HLA-A*31:01; TUBA3C; ENSG00000198033; TAA
RPTYTNLNR

SEQ ID NO: 95495 - protein, 10 aa, Homo sapiens
  Table A; Target 95495; HLA-B*07:02; TUBA3C; ENSG00000198033; TAA
RPTYTNLNRL

SEQ ID NO: 95496 - protein, 10 aa, Homo sapiens
  Table A; Target 95496; HLA-B*56:01; TUBA3C; ENSG00000198033; TAA
RPTYTNLNRL

SEQ ID NO: 95497 - protein, 10 aa, Homo sapiens
  Table A; Target 95497; HLA-C*07:02; TUBA3C; ENSG00000198033; TAA
RPTYTNLNRL

SEQ ID NO: 95498 - protein, 9 aa, Homo sapiens
  Table A; Target 95498; HLA-A*02:01; TUBA3C; ENSG00000198033; TAA
RQLFHPEQL

SEQ ID NO: 95499 - protein, 9 aa, Homo sapiens
  Table A; Target 95499; HLA-A*02:03; TUBA3C; ENSG00000198033; TAA
RQLFHPEQL

SEQ ID NO: 95500 - protein, 9 aa, Homo sapiens
  Table A; Target 95500; HLA-A*02:04; TUBA3C; ENSG00000198033; TAA
RQLFHPEQL

SEQ ID NO: 95501 - protein, 9 aa, Homo sapiens
  Table A; Target 95501; HLA-A*31:01; TUBA3C; ENSG00000198033; TAA
RQLFHPEQL

SEQ ID NO: 95502 - protein, 9 aa, Homo sapiens
  Table A; Target 95502; HLA-B*13:02; TUBA3C; ENSG00000198033; TAA
RQLFHPEQL

SEQ ID NO: 95503 - protein, 9 aa, Homo sapiens
  Table A; Target 95503; HLA-B*37:01; TUBA3C; ENSG00000198033; TAA
RQLFHPEQL

SEQ ID NO: 95504 - protein, 10 aa, Homo sapiens
  Table A; Target 95504; HLA-B*13:02; TUBA3C; ENSG00000198033; TAA
RQLFHPEQLI

SEQ ID NO: 95505 - protein, 11 aa, Homo sapiens
  Table A; Target 95505; HLA-C*16:04; TUBA3C; ENSG00000198033; TAA
RRNLDIERPTY

SEQ ID NO: 95506 - protein, 9 aa, Homo sapiens
  Table A; Target 95506; HLA-A*24:02; TUBA3C; ENSG00000198033; TAA
RTGTYRQLF

SEQ ID NO: 95507 - protein, 9 aa, Homo sapiens
  Table A; Target 95507; HLA-A*31:01; TUBA3C; ENSG00000198033; TAA
RTGTYRQLF

SEQ ID NO: 95508 - protein, 9 aa, Homo sapiens
  Table A; Target 95508; HLA-A*32:01; TUBA3C; ENSG00000198033; TAA
RTGTYRQLF

SEQ ID NO: 95509 - protein, 9 aa, Homo sapiens
  Table A; Target 95509; HLA-B*57:01; TUBA3C; ENSG00000198033; TAA
RTGTYRQLF

SEQ ID NO: 95510 - protein, 9 aa, Homo sapiens
  Table A; Target 95510; HLA-B*58:01; TUBA3C; ENSG00000198033; TAA
RTGTYRQLF

SEQ ID NO: 95511 - protein, 8 aa, Homo sapiens
  Table A; Target 95511; HLA-B*57:01; TUBA3C; ENSG00000198033; TAA
RTIQFVDW

SEQ ID NO: 95512 - protein, 8 aa, Homo sapiens
  Table A; Target 95512; HLA-B*58:01; TUBA3C; ENSG00000198033; TAA
RTIQFVDW

SEQ ID NO: 95513 - protein, 10 aa, Homo sapiens
  Table A; Target 95513; HLA-B*38:01; TUBA3C; ENSG00000198033; TAA
SAEKAYHEQL

SEQ ID NO: 95514 - protein, 10 aa, Homo sapiens
  Table A; Target 95514; HLA-B*40:01; TUBA3C; ENSG00000198033; TAA
SAEKAYHEQL

SEQ ID NO: 95515 - protein, 10 aa, Homo sapiens
  Table A; Target 95515; HLA-A*30:01; TUBA3C; ENSG00000198033; TAA
SEAREDLAAL

SEQ ID NO: 95516 - protein, 10 aa, Homo sapiens
  Table A; Target 95516; HLA-B*27:05; TUBA3C; ENSG00000198033; TAA
SEAREDLAAL

SEQ ID NO: 95517 - protein, 10 aa, Homo sapiens
  Table A; Target 95517; HLA-B*40:01; TUBA3C; ENSG00000198033; TAA
SEAREDLAAL

SEQ ID NO: 95518 - protein, 10 aa, Homo sapiens
  Table A; Target 95518; HLA-B*40:02; TUBA3C; ENSG00000198033; TAA
SEAREDLAAL

SEQ ID NO: 95519 - protein, 10 aa, Homo sapiens
  Table A; Target 95519; HLA-B*44:02; TUBA3C; ENSG00000198033; TAA
SEAREDLAAL

SEQ ID NO: 95520 - protein, 10 aa, Homo sapiens
  Table A; Target 95520; HLA-B*44:03; TUBA3C; ENSG00000198033; TAA
SEAREDLAAL

SEQ ID NO: 95521 - protein, 10 aa, Homo sapiens
  Table A; Target 95521; HLA-B*49:01; TUBA3C; ENSG00000198033; TAA
SEAREDLAAL

SEQ ID NO: 95522 - protein, 9 aa, Homo sapiens
  Table A; Target 95522; HLA-A*30:01; TUBA3C; ENSG00000198033; TAA
SETGAGKHV

SEQ ID NO: 95523 - protein, 9 aa, Homo sapiens
  Table A; Target 95523; HLA-B*13:02; TUBA3C; ENSG00000198033; TAA
SETGAGKHV

SEQ ID NO: 95524 - protein, 9 aa, Homo sapiens
  Table A; Target 95524; HLA-B*37:01; TUBA3C; ENSG00000198033; TAA
SETGAGKHV

SEQ ID NO: 95525 - protein, 9 aa, Homo sapiens
  Table A; Target 95525; HLA-B*40:01; TUBA3C; ENSG00000198033; TAA
SETGAGKHV

SEQ ID NO: 95526 - protein, 9 aa, Homo sapiens
  Table A; Target 95526; HLA-B*40:02; TUBA3C; ENSG00000198033; TAA
SETGAGKHV

SEQ ID NO: 95527 - protein, 9 aa, Homo sapiens
  Table A; Target 95527; HLA-B*44:02; TUBA3C; ENSG00000198033; TAA
SETGAGKHV

SEQ ID NO: 95528 - protein, 9 aa, Homo sapiens
  Table A; Target 95528; HLA-B*44:03; TUBA3C; ENSG00000198033; TAA
SETGAGKHV

SEQ ID NO: 95529 - protein, 9 aa, Homo sapiens
  Table A; Target 95529; HLA-B*49:01; TUBA3C; ENSG00000198033; TAA
SETGAGKHV

SEQ ID NO: 95530 - protein, 9 aa, Homo sapiens
  Table A; Target 95530; HLA-C*02:02; TUBA3C; ENSG00000198033; TAA
SETGAGKHV

SEQ ID NO: 95531 - protein, 9 aa, Homo sapiens
  Table A; Target 95531; HLA-C*04:01; TUBA3C; ENSG00000198033; TAA
SETGAGKHV

SEQ ID NO: 95532 - protein, 9 aa, Homo sapiens
  Table A; Target 95532; HLA-C*06:02; TUBA3C; ENSG00000198033; TAA
SETGAGKHV

SEQ ID NO: 95533 - protein, 9 aa, Homo sapiens
  Table A; Target 95533; HLA-C*16:02; TUBA3C; ENSG00000198033; TAA
SETGAGKHV

SEQ ID NO: 95534 - protein, 9 aa, Homo sapiens
  Table A; Target 95534; HLA-C*16:04; TUBA3C; ENSG00000198033; TAA
SETGAGKHV

SEQ ID NO: 95535 - protein, 10 aa, Homo sapiens
  Table A; Target 95535; HLA-A*30:01; TUBA3C; ENSG00000198033; TAA
SETGAGKHVP

SEQ ID NO: 95536 - protein, 10 aa, Homo sapiens
  Table A; Target 95536; HLA-B*40:01; TUBA3C; ENSG00000198033; TAA
SETGAGKHVP

SEQ ID NO: 95537 - protein, 10 aa, Homo sapiens
  Table A; Target 95537; HLA-B*40:02; TUBA3C; ENSG00000198033; TAA
SETGAGKHVP

SEQ ID NO: 95538 - protein, 10 aa, Homo sapiens
  Table A; Target 95538; HLA-B*44:02; TUBA3C; ENSG00000198033; TAA
SETGAGKHVP

SEQ ID NO: 95539 - protein, 10 aa, Homo sapiens
  Table A; Target 95539; HLA-B*44:03; TUBA3C; ENSG00000198033; TAA
SETGAGKHVP

SEQ ID NO: 95540 - protein, 10 aa, Homo sapiens
  Table A; Target 95540; HLA-B*49:01; TUBA3C; ENSG00000198033; TAA
SETGAGKHVP

SEQ ID NO: 95541 - protein, 10 aa, Homo sapiens
  Table A; Target 95541; HLA-C*06:02; TUBA3C; ENSG00000198033; TAA
SETGAGKHVP

SEQ ID NO: 95542 - protein, 10 aa, Homo sapiens
  Table A; Target 95542; HLA-C*07:01; TUBA3C; ENSG00000198033; TAA
SETGAGKHVP

SEQ ID NO: 95543 - protein, 10 aa, Homo sapiens
  Table A; Target 95543; HLA-C*07:04; TUBA3C; ENSG00000198033; TAA
SETGAGKHVP

SEQ ID NO: 95544 - protein, 10 aa, Homo sapiens
  Table A; Target 95544; HLA-C*16:02; TUBA3C; ENSG00000198033; TAA
SETGAGKHVP

SEQ ID NO: 95545 - protein, 10 aa, Homo sapiens
  Table A; Target 95545; HLA-C*16:04; TUBA3C; ENSG00000198033; TAA
SETGAGKHVP

SEQ ID NO: 95546 - protein, 11 aa, Homo sapiens
  Table A; Target 95546; HLA-A*31:01; TUBA3C; ENSG00000198033; TAA
SETGAGKHVPR

SEQ ID NO: 95547 - protein, 11 aa, Homo sapiens
  Table A; Target 95547; HLA-A*33:01; TUBA3C; ENSG00000198033; TAA
SETGAGKHVPR

SEQ ID NO: 95548 - protein, 11 aa, Homo sapiens
  Table A; Target 95548; HLA-A*33:03; TUBA3C; ENSG00000198033; TAA
SETGAGKHVPR

SEQ ID NO: 95549 - protein, 11 aa, Homo sapiens
  Table A; Target 95549; HLA-A*68:01; TUBA3C; ENSG00000198033; TAA
SETGAGKHVPR

SEQ ID NO: 95550 - protein, 11 aa, Homo sapiens
  Table A; Target 95550; HLA-A*68:02; TUBA3C; ENSG00000198033; TAA
SETGAGKHVPR

SEQ ID NO: 95551 - protein, 11 aa, Homo sapiens
  Table A; Target 95551; HLA-B*40:02; TUBA3C; ENSG00000198033; TAA
SETGAGKHVPR

SEQ ID NO: 95552 - protein, 11 aa, Homo sapiens
  Table A; Target 95552; HLA-C*04:01; TUBA3C; ENSG00000198033; TAA
SETGAGKHVPR

SEQ ID NO: 95553 - protein, 11 aa, Homo sapiens
  Table A; Target 95553; HLA-C*06:02; TUBA3C; ENSG00000198033; TAA
SETGAGKHVPR

SEQ ID NO: 95554 - protein, 11 aa, Homo sapiens
  Table A; Target 95554; HLA-C*07:01; TUBA3C; ENSG00000198033; TAA
SETGAGKHVPR

SEQ ID NO: 95555 - protein, 10 aa, Homo sapiens
  Table A; Target 95555; HLA-A*23:01; TUBA3C; ENSG00000198033; TAA
SFGGGTGSGF

SEQ ID NO: 95556 - protein, 10 aa, Homo sapiens
  Table A; Target 95556; HLA-A*24:02; TUBA3C; ENSG00000198033; TAA
SFGGGTGSGF

SEQ ID NO: 95557 - protein, 10 aa, Homo sapiens
  Table A; Target 95557; HLA-A*29:02; TUBA3C; ENSG00000198033; TAA
SFGGGTGSGF

SEQ ID NO: 95558 - protein, 10 aa, Homo sapiens
  Table A; Target 95558; HLA-A*30:02; TUBA3C; ENSG00000198033; TAA
SFGGGTGSGF

SEQ ID NO: 95559 - protein, 10 aa, Homo sapiens
  Table A; Target 95559; HLA-A*32:01; TUBA3C; ENSG00000198033; TAA
SFGGGTGSGF

SEQ ID NO: 95560 - protein, 10 aa, Homo sapiens
  Table A; Target 95560; HLA-B*15:01; TUBA3C; ENSG00000198033; TAA
SFGGGTGSGF

SEQ ID NO: 95561 - protein, 10 aa, Homo sapiens
  Table A; Target 95561; HLA-B*15:03; TUBA3C; ENSG00000198033; TAA
SFGGGTGSGF

SEQ ID NO: 95562 - protein, 10 aa, Homo sapiens
  Table A; Target 95562; HLA-C*01:02; TUBA3C; ENSG00000198033; TAA
SFGGGTGSGF

SEQ ID NO: 95563 - protein, 10 aa, Homo sapiens
  Table A; Target 95563; HLA-C*04:01; TUBA3C; ENSG00000198033; TAA
SFGGGTGSGF

SEQ ID NO: 95564 - protein, 10 aa, Homo sapiens
  Table A; Target 95564; HLA-C*07:01; TUBA3C; ENSG00000198033; TAA
SFGGGTGSGF

SEQ ID NO: 95565 - protein, 10 aa, Homo sapiens
  Table A; Target 95565; HLA-C*07:04; TUBA3C; ENSG00000198033; TAA
SFGGGTGSGF

SEQ ID NO: 95566 - protein, 10 aa, Homo sapiens
  Table A; Target 95566; HLA-C*14:02; TUBA3C; ENSG00000198033; TAA
SFGGGTGSGF

SEQ ID NO: 95567 - protein, 9 aa, Homo sapiens
  Table A; Target 95567; HLA-A*31:01; TUBA3C; ENSG00000198033; TAA
SFNTFFSET

SEQ ID NO: 95568 - protein, 8 aa, Homo sapiens
  Table A; Target 95568; HLA-B*51:01; TUBA3C; ENSG00000198033; TAA
SGFASLLM

SEQ ID NO: 95569 - protein, 8 aa, Homo sapiens
  Table A; Target 95569; HLA-C*06:02; TUBA3C; ENSG00000198033; TAA
SGFASLLM

SEQ ID NO: 95570 - protein, 8 aa, Homo sapiens
  Table A; Target 95570; HLA-C*07:01; TUBA3C; ENSG00000198033; TAA
SGFASLLM

SEQ ID NO: 95571 - protein, 10 aa, Homo sapiens
  Table A; Target 95571; HLA-A*31:01; TUBA3C; ENSG00000198033; TAA
SGFASLLMER

SEQ ID NO: 95572 - protein, 10 aa, Homo sapiens
  Table A; Target 95572; HLA-C*07:06; TUBA3C; ENSG00000198033; TAA
SGFASLLMER

SEQ ID NO: 95573 - protein, 8 aa, Homo sapiens
  Table A; Target 95573; HLA-C*01:02; TUBA3C; ENSG00000198033; TAA
SIHVGQAG

SEQ ID NO: 95574 - protein, 9 aa, Homo sapiens
  Table A; Target 95574; HLA-A*02:01; TUBA3C; ENSG00000198033; TAA
SIHVGQAGV

SEQ ID NO: 95575 - protein, 9 aa, Homo sapiens
  Table A; Target 95575; HLA-A*02:03; TUBA3C; ENSG00000198033; TAA
SIHVGQAGV

SEQ ID NO: 95576 - protein, 9 aa, Homo sapiens
  Table A; Target 95576; HLA-A*02:07; TUBA3C; ENSG00000198033; TAA
SIHVGQAGV

SEQ ID NO: 95577 - protein, 9 aa, Homo sapiens
  Table A; Target 95577; HLA-A*32:01; TUBA3C; ENSG00000198033; TAA
SIHVGQAGV

SEQ ID NO: 95578 - protein, 9 aa, Homo sapiens
  Table A; Target 95578; HLA-B*13:02; TUBA3C; ENSG00000198033; TAA
SIHVGQAGV

SEQ ID NO: 95579 - protein, 9 aa, Homo sapiens
  Table A; Target 95579; HLA-B*37:01; TUBA3C; ENSG00000198033; TAA
SIHVGQAGV

SEQ ID NO: 95580 - protein, 9 aa, Homo sapiens
  Table A; Target 95580; HLA-B*46:01; TUBA3C; ENSG00000198033; TAA
SIHVGQAGV

SEQ ID NO: 95581 - protein, 9 aa, Homo sapiens
  Table A; Target 95581; HLA-B*55:01; TUBA3C; ENSG00000198033; TAA
SIHVGQAGV

SEQ ID NO: 95582 - protein, 9 aa, Homo sapiens
  Table A; Target 95582; HLA-C*01:02; TUBA3C; ENSG00000198033; TAA
SIHVGQAGV

SEQ ID NO: 95583 - protein, 10 aa, Homo sapiens
  Table A; Target 95583; HLA-C*07:01; TUBA3C; ENSG00000198033; TAA
SIHVGQAGVQ

SEQ ID NO: 95584 - protein, 11 aa, Homo sapiens
  Table A; Target 95584; HLA-C*04:01; TUBA3C; ENSG00000198033; TAA
SIHVGQAGVQI

SEQ ID NO: 95585 - protein, 9 aa, Homo sapiens
  Table A; Target 95585; HLA-A*02:01; TUBA3C; ENSG00000198033; TAA
SILTTHTTL

SEQ ID NO: 95586 - protein, 9 aa, Homo sapiens
  Table A; Target 95586; HLA-A*02:03; TUBA3C; ENSG00000198033; TAA
SILTTHTTL

SEQ ID NO: 95587 - protein, 9 aa, Homo sapiens
  Table A; Target 95587; HLA-A*02:04; TUBA3C; ENSG00000198033; TAA
SILTTHTTL

SEQ ID NO: 95588 - protein, 9 aa, Homo sapiens
  Table A; Target 95588; HLA-A*02:07; TUBA3C; ENSG00000198033; TAA
SILTTHTTL

SEQ ID NO: 95589 - protein, 9 aa, Homo sapiens
  Table A; Target 95589; HLA-A*03:01; TUBA3C; ENSG00000198033; TAA
SILTTHTTL

SEQ ID NO: 95590 - protein, 9 aa, Homo sapiens
  Table A; Target 95590; HLA-A*23:01; TUBA3C; ENSG00000198033; TAA
SILTTHTTL

SEQ ID NO: 95591 - protein, 9 aa, Homo sapiens
  Table A; Target 95591; HLA-A*24:02; TUBA3C; ENSG00000198033; TAA
SILTTHTTL

SEQ ID NO: 95592 - protein, 9 aa, Homo sapiens
  Table A; Target 95592; HLA-A*30:01; TUBA3C; ENSG00000198033; TAA
SILTTHTTL

SEQ ID NO: 95593 - protein, 9 aa, Homo sapiens
  Table A; Target 95593; HLA-A*31:01; TUBA3C; ENSG00000198033; TAA
SILTTHTTL

SEQ ID NO: 95594 - protein, 9 aa, Homo sapiens
  Table A; Target 95594; HLA-A*32:01; TUBA3C; ENSG00000198033; TAA
SILTTHTTL

SEQ ID NO: 95595 - protein, 9 aa, Homo sapiens
  Table A; Target 95595; HLA-A*68:02; TUBA3C; ENSG00000198033; TAA
SILTTHTTL

SEQ ID NO: 95596 - protein, 9 aa, Homo sapiens
  Table A; Target 95596; HLA-B*07:02; TUBA3C; ENSG00000198033; TAA
SILTTHTTL

SEQ ID NO: 95597 - protein, 9 aa, Homo sapiens
  Table A; Target 95597; HLA-B*08:01; TUBA3C; ENSG00000198033; TAA
SILTTHTTL

SEQ ID NO: 95598 - protein, 9 aa, Homo sapiens
  Table A; Target 95598; HLA-B*13:02; TUBA3C; ENSG00000198033; TAA
SILTTHTTL

SEQ ID NO: 95599 - protein, 9 aa, Homo sapiens
  Table A; Target 95599; HLA-B*15:01; TUBA3C; ENSG00000198033; TAA
SILTTHTTL

SEQ ID NO: 95600 - protein, 9 aa, Homo sapiens
  Table A; Target 95600; HLA-B*15:03; TUBA3C; ENSG00000198033; TAA
SILTTHTTL

SEQ ID NO: 95601 - protein, 9 aa, Homo sapiens
  Table A; Target 95601; HLA-B*27:05; TUBA3C; ENSG00000198033; TAA
SILTTHTTL

SEQ ID NO: 95602 - protein, 9 aa, Homo sapiens
  Table A; Target 95602; HLA-B*35:03; TUBA3C; ENSG00000198033; TAA
SILTTHTTL

SEQ ID NO: 95603 - protein, 9 aa, Homo sapiens
  Table A; Target 95603; HLA-B*37:01; TUBA3C; ENSG00000198033; TAA
SILTTHTTL

SEQ ID NO: 95604 - protein, 9 aa, Homo sapiens
  Table A; Target 95604; HLA-B*38:01; TUBA3C; ENSG00000198033; TAA
SILTTHTTL

SEQ ID NO: 95605 - protein, 9 aa, Homo sapiens
  Table A; Target 95605; HLA-B*39:01; TUBA3C; ENSG00000198033; TAA
SILTTHTTL

SEQ ID NO: 95606 - protein, 9 aa, Homo sapiens
  Table A; Target 95606; HLA-B*40:01; TUBA3C; ENSG00000198033; TAA
SILTTHTTL

SEQ ID NO: 95607 - protein, 9 aa, Homo sapiens
  Table A; Target 95607; HLA-B*40:02; TUBA3C; ENSG00000198033; TAA
SILTTHTTL

SEQ ID NO: 95608 - protein, 9 aa, Homo sapiens
  Table A; Target 95608; HLA-B*46:01; TUBA3C; ENSG00000198033; TAA
SILTTHTTL

SEQ ID NO: 95609 - protein, 9 aa, Homo sapiens
  Table A; Target 95609; HLA-B*55:01; TUBA3C; ENSG00000198033; TAA
SILTTHTTL

SEQ ID NO: 95610 - protein, 9 aa, Homo sapiens
  Table A; Target 95610; HLA-B*57:01; TUBA3C; ENSG00000198033; TAA
SILTTHTTL

SEQ ID NO: 95611 - protein, 9 aa, Homo sapiens
  Table A; Target 95611; HLA-B*58:01; TUBA3C; ENSG00000198033; TAA
SILTTHTTL

SEQ ID NO: 95612 - protein, 9 aa, Homo sapiens
  Table A; Target 95612; HLA-C*01:02; TUBA3C; ENSG00000198033; TAA
SILTTHTTL

SEQ ID NO: 95613 - protein, 9 aa, Homo sapiens
  Table A; Target 95613; HLA-C*02:02; TUBA3C; ENSG00000198033; TAA
SILTTHTTL

SEQ ID NO: 95614 - protein, 9 aa, Homo sapiens
  Table A; Target 95614; HLA-C*03:03; TUBA3C; ENSG00000198033; TAA
SILTTHTTL

SEQ ID NO: 95615 - protein, 9 aa, Homo sapiens
  Table A; Target 95615; HLA-C*03:04; TUBA3C; ENSG00000198033; TAA
SILTTHTTL

SEQ ID NO: 95616 - protein, 9 aa, Homo sapiens
  Table A; Target 95616; HLA-C*04:01; TUBA3C; ENSG00000198033; TAA
SILTTHTTL

SEQ ID NO: 95617 - protein, 9 aa, Homo sapiens
  Table A; Target 95617; HLA-C*05:01; TUBA3C; ENSG00000198033; TAA
SILTTHTTL

SEQ ID NO: 95618 - protein, 9 aa, Homo sapiens
  Table A; Target 95618; HLA-C*07:02; TUBA3C; ENSG00000198033; TAA
SILTTHTTL

SEQ ID NO: 95619 - protein, 9 aa, Homo sapiens
  Table A; Target 95619; HLA-C*07:04; TUBA3C; ENSG00000198033; TAA
SILTTHTTL

SEQ ID NO: 95620 - protein, 9 aa, Homo sapiens
  Table A; Target 95620; HLA-C*07:06; TUBA3C; ENSG00000198033; TAA
SILTTHTTL

SEQ ID NO: 95621 - protein, 9 aa, Homo sapiens
  Table A; Target 95621; HLA-C*12:03; TUBA3C; ENSG00000198033; TAA
SILTTHTTL

SEQ ID NO: 95622 - protein, 9 aa, Homo sapiens
  Table A; Target 95622; HLA-C*14:02; TUBA3C; ENSG00000198033; TAA
SILTTHTTL

SEQ ID NO: 95623 - protein, 9 aa, Homo sapiens
  Table A; Target 95623; HLA-C*16:01; TUBA3C; ENSG00000198033; TAA
SILTTHTTL

SEQ ID NO: 95624 - protein, 9 aa, Homo sapiens
  Table A; Target 95624; HLA-C*16:02; TUBA3C; ENSG00000198033; TAA
SILTTHTTL

SEQ ID NO: 95625 - protein, 9 aa, Homo sapiens
  Table A; Target 95625; HLA-C*16:04; TUBA3C; ENSG00000198033; TAA
SILTTHTTL

SEQ ID NO: 95626 - protein, 8 aa, Homo sapiens
  Table A; Target 95626; HLA-B*37:01; TUBA3C; ENSG00000198033; TAA
SITASLRF

SEQ ID NO: 95627 - protein, 8 aa, Homo sapiens
  Table A; Target 95627; HLA-C*04:01; TUBA3C; ENSG00000198033; TAA
SITASLRF

SEQ ID NO: 95628 - protein, 8 aa, Homo sapiens
  Table A; Target 95628; HLA-C*07:01; TUBA3C; ENSG00000198033; TAA
SITASLRF

SEQ ID NO: 95629 - protein, 8 aa, Homo sapiens
  Table A; Target 95629; HLA-C*16:01; TUBA3C; ENSG00000198033; TAA
SITASLRF

SEQ ID NO: 95630 - protein, 8 aa, Homo sapiens
  Table A; Target 95630; HLA-B*15:03; TUBA3C; ENSG00000198033; TAA
SKLEFAIY

SEQ ID NO: 95631 - protein, 9 aa, Homo sapiens
  Table A; Target 95631; HLA-A*02:01; TUBA3C; ENSG00000198033; TAA
SLLMERLSV

SEQ ID NO: 95632 - protein, 9 aa, Homo sapiens
  Table A; Target 95632; HLA-A*02:03; TUBA3C; ENSG00000198033; TAA
SLLMERLSV

SEQ ID NO: 95633 - protein, 9 aa, Homo sapiens
  Table A; Target 95633; HLA-A*02:04; TUBA3C; ENSG00000198033; TAA
SLLMERLSV

SEQ ID NO: 95634 - protein, 9 aa, Homo sapiens
  Table A; Target 95634; HLA-A*02:07; TUBA3C; ENSG00000198033; TAA
SLLMERLSV

SEQ ID NO: 95635 - protein, 9 aa, Homo sapiens
  Table A; Target 95635; HLA-B*08:01; TUBA3C; ENSG00000198033; TAA
SLLMERLSV

SEQ ID NO: 95636 - protein, 9 aa, Homo sapiens
  Table A; Target 95636; HLA-B*13:02; TUBA3C; ENSG00000198033; TAA
SLLMERLSV

SEQ ID NO: 95637 - protein, 9 aa, Homo sapiens
  Table A; Target 95637; HLA-B*55:01; TUBA3C; ENSG00000198033; TAA
SLLMERLSV

SEQ ID NO: 95638 - protein, 11 aa, Homo sapiens
  Table A; Target 95638; HLA-A*29:02; TUBA3C; ENSG00000198033; TAA
SLLMERLSVDY

SEQ ID NO: 95639 - protein, 11 aa, Homo sapiens
  Table A; Target 95639; HLA-A*30:02; TUBA3C; ENSG00000198033; TAA
SLLMERLSVDY

SEQ ID NO: 95640 - protein, 11 aa, Homo sapiens
  Table A; Target 95640; HLA-C*04:01; TUBA3C; ENSG00000198033; TAA
SLLMERLSVDY

SEQ ID NO: 95641 - protein, 11 aa, Homo sapiens
  Table A; Target 95641; HLA-C*07:01; TUBA3C; ENSG00000198033; TAA
SLLMERLSVDY

SEQ ID NO: 95642 - protein, 10 aa, Homo sapiens
  Table A; Target 95642; HLA-A*02:03; TUBA3C; ENSG00000198033; TAA
SLRFDGALNV

SEQ ID NO: 95643 - protein, 10 aa, Homo sapiens
  Table A; Target 95643; HLA-A*02:04; TUBA3C; ENSG00000198033; TAA
SLRFDGALNV

SEQ ID NO: 95644 - protein, 10 aa, Homo sapiens
  Table A; Target 95644; HLA-C*06:02; TUBA3C; ENSG00000198033; TAA
SLRFDGALNV

SEQ ID NO: 95645 - protein, 9 aa, Homo sapiens
  Table A; Target 95645; HLA-B*54:01; TUBA3C; ENSG00000198033; TAA
SNTTAIAEA

SEQ ID NO: 95646 - protein, 10 aa, Homo sapiens
  Table A; Target 95646; HLA-A*25:01; TUBA3C; ENSG00000198033; TAA
SNTTAIAEAW

SEQ ID NO: 95647 - protein, 10 aa, Homo sapiens
  Table A; Target 95647; HLA-B*07:02; TUBA3C; ENSG00000198033; TAA
SNTTAIAEAW

SEQ ID NO: 95648 - protein, 10 aa, Homo sapiens
  Table A; Target 95648; HLA-B*27:02; TUBA3C; ENSG00000198033; TAA
SNTTAIAEAW

SEQ ID NO: 95649 - protein, 10 aa, Homo sapiens
  Table A; Target 95649; HLA-B*44:02; TUBA3C; ENSG00000198033; TAA
SNTTAIAEAW

SEQ ID NO: 95650 - protein, 10 aa, Homo sapiens
  Table A; Target 95650; HLA-B*44:03; TUBA3C; ENSG00000198033; TAA
SNTTAIAEAW

SEQ ID NO: 95651 - protein, 10 aa, Homo sapiens
  Table A; Target 95651; HLA-B*57:01; TUBA3C; ENSG00000198033; TAA
SNTTAIAEAW

SEQ ID NO: 95652 - protein, 10 aa, Homo sapiens
  Table A; Target 95652; HLA-B*58:01; TUBA3C; ENSG00000198033; TAA
SNTTAIAEAW

SEQ ID NO: 95653 - protein, 10 aa, Homo sapiens
  Table A; Target 95653; HLA-C*16:04; TUBA3C; ENSG00000198033; TAA
SNTTAIAEAW

SEQ ID NO: 95654 - protein, 8 aa, Homo sapiens
  Table A; Target 95654; HLA-A*11:01; TUBA3C; ENSG00000198033; TAA
SSITASLR

SEQ ID NO: 95655 - protein, 8 aa, Homo sapiens
  Table A; Target 95655; HLA-A*31:01; TUBA3C; ENSG00000198033; TAA
SSITASLR

SEQ ID NO: 95656 - protein, 8 aa, Homo sapiens
  Table A; Target 95656; HLA-A*33:01; TUBA3C; ENSG00000198033; TAA
SSITASLR

SEQ ID NO: 95657 - protein, 8 aa, Homo sapiens
  Table A; Target 95657; HLA-A*33:03; TUBA3C; ENSG00000198033; TAA
SSITASLR

SEQ ID NO: 95658 - protein, 8 aa, Homo sapiens
  Table A; Target 95658; HLA-A*68:01; TUBA3C; ENSG00000198033; TAA
SSITASLR

SEQ ID NO: 95659 - protein, 8 aa, Homo sapiens
  Table A; Target 95659; HLA-B*57:01; TUBA3C; ENSG00000198033; TAA
SSITASLR

SEQ ID NO: 95660 - protein, 8 aa, Homo sapiens
  Table A; Target 95660; HLA-C*06:02; TUBA3C; ENSG00000198033; TAA
SSITASLR

SEQ ID NO: 95661 - protein, 8 aa, Homo sapiens
  Table A; Target 95661; HLA-C*07:06; TUBA3C; ENSG00000198033; TAA
SSITASLR

SEQ ID NO: 95662 - protein, 9 aa, Homo sapiens
  Table A; Target 95662; HLA-A*01:01; TUBA3C; ENSG00000198033; TAA
SSITASLRF

SEQ ID NO: 95663 - protein, 9 aa, Homo sapiens
  Table A; Target 95663; HLA-A*11:01; TUBA3C; ENSG00000198033; TAA
SSITASLRF

SEQ ID NO: 95664 - protein, 9 aa, Homo sapiens
  Table A; Target 95664; HLA-A*23:01; TUBA3C; ENSG00000198033; TAA
SSITASLRF

SEQ ID NO: 95665 - protein, 9 aa, Homo sapiens
  Table A; Target 95665; HLA-A*24:02; TUBA3C; ENSG00000198033; TAA
SSITASLRF

SEQ ID NO: 95666 - protein, 9 aa, Homo sapiens
  Table A; Target 95666; HLA-A*25:01; TUBA3C; ENSG00000198033; TAA
SSITASLRF

SEQ ID NO: 95667 - protein, 9 aa, Homo sapiens
  Table A; Target 95667; HLA-A*26:01; TUBA3C; ENSG00000198033; TAA
SSITASLRF

SEQ ID NO: 95668 - protein, 9 aa, Homo sapiens
  Table A; Target 95668; HLA-A*29:02; TUBA3C; ENSG00000198033; TAA
SSITASLRF

SEQ ID NO: 95669 - protein, 9 aa, Homo sapiens
  Table A; Target 95669; HLA-A*30:02; TUBA3C; ENSG00000198033; TAA
SSITASLRF

SEQ ID NO: 95670 - protein, 9 aa, Homo sapiens
  Table A; Target 95670; HLA-A*32:01; TUBA3C; ENSG00000198033; TAA
SSITASLRF

SEQ ID NO: 95671 - protein, 9 aa, Homo sapiens
  Table A; Target 95671; HLA-B*15:01; TUBA3C; ENSG00000198033; TAA
SSITASLRF

SEQ ID NO: 95672 - protein, 9 aa, Homo sapiens
  Table A; Target 95672; HLA-B*44:02; TUBA3C; ENSG00000198033; TAA
SSITASLRF

SEQ ID NO: 95673 - protein, 9 aa, Homo sapiens
  Table A; Target 95673; HLA-B*44:03; TUBA3C; ENSG00000198033; TAA
SSITASLRF

SEQ ID NO: 95674 - protein, 9 aa, Homo sapiens
  Table A; Target 95674; HLA-B*46:01; TUBA3C; ENSG00000198033; TAA
SSITASLRF

SEQ ID NO: 95675 - protein, 9 aa, Homo sapiens
  Table A; Target 95675; HLA-B*57:01; TUBA3C; ENSG00000198033; TAA
SSITASLRF

SEQ ID NO: 95676 - protein, 9 aa, Homo sapiens
  Table A; Target 95676; HLA-B*58:01; TUBA3C; ENSG00000198033; TAA
SSITASLRF

SEQ ID NO: 95677 - protein, 9 aa, Homo sapiens
  Table A; Target 95677; HLA-C*02:02; TUBA3C; ENSG00000198033; TAA
SSITASLRF

SEQ ID NO: 95678 - protein, 9 aa, Homo sapiens
  Table A; Target 95678; HLA-C*04:01; TUBA3C; ENSG00000198033; TAA
SSITASLRF

SEQ ID NO: 95679 - protein, 9 aa, Homo sapiens
  Table A; Target 95679; HLA-C*07:06; TUBA3C; ENSG00000198033; TAA
SSITASLRF

SEQ ID NO: 95680 - protein, 9 aa, Homo sapiens
  Table A; Target 95680; HLA-C*16:01; TUBA3C; ENSG00000198033; TAA
SSITASLRF

SEQ ID NO: 95681 - protein, 9 aa, Homo sapiens
  Table A; Target 95681; HLA-C*16:04; TUBA3C; ENSG00000198033; TAA
SSITASLRF

SEQ ID NO: 95682 - protein, 8 aa, Homo sapiens
  Table A; Target 95682; HLA-A*01:01; TUBA3C; ENSG00000198033; TAA
STAVVEPY

SEQ ID NO: 95683 - protein, 8 aa, Homo sapiens
  Table A; Target 95683; HLA-A*30:02; TUBA3C; ENSG00000198033; TAA
STAVVEPY

SEQ ID NO: 95684 - protein, 8 aa, Homo sapiens
  Table A; Target 95684; HLA-B*15:01; TUBA3C; ENSG00000198033; TAA
STAVVEPY

SEQ ID NO: 95685 - protein, 8 aa, Homo sapiens
  Table A; Target 95685; HLA-B*18:01; TUBA3C; ENSG00000198033; TAA
STAVVEPY

SEQ ID NO: 95686 - protein, 8 aa, Homo sapiens
  Table A; Target 95686; HLA-B*46:01; TUBA3C; ENSG00000198033; TAA
STAVVEPY

SEQ ID NO: 95687 - protein, 8 aa, Homo sapiens
  Table A; Target 95687; HLA-C*01:02; TUBA3C; ENSG00000198033; TAA
STAVVEPY

SEQ ID NO: 95688 - protein, 8 aa, Homo sapiens
  Table A; Target 95688; HLA-C*03:03; TUBA3C; ENSG00000198033; TAA
STAVVEPY

SEQ ID NO: 95689 - protein, 8 aa, Homo sapiens
  Table A; Target 95689; HLA-C*07:01; TUBA3C; ENSG00000198033; TAA
STAVVEPY

SEQ ID NO: 95690 - protein, 8 aa, Homo sapiens
  Table A; Target 95690; HLA-C*07:04; TUBA3C; ENSG00000198033; TAA
STAVVEPY

SEQ ID NO: 95691 - protein, 9 aa, Homo sapiens
  Table A; Target 95691; HLA-C*06:02; TUBA3C; ENSG00000198033; TAA
STAVVEPYN

SEQ ID NO: 95692 - protein, 11 aa, Homo sapiens
  Table A; Target 95692; HLA-A*25:01; TUBA3C; ENSG00000198033; TAA
STAVVEPYNSI

SEQ ID NO: 95693 - protein, 11 aa, Homo sapiens
  Table A; Target 95693; HLA-A*68:02; TUBA3C; ENSG00000198033; TAA
STAVVEPYNSI

SEQ ID NO: 95694 - protein, 8 aa, Homo sapiens
  Table A; Target 95694; HLA-A*02:01; TUBA3C; ENSG00000198033; TAA
SVAEITNA

SEQ ID NO: 95695 - protein, 8 aa, Homo sapiens
  Table A; Target 95695; HLA-A*02:03; TUBA3C; ENSG00000198033; TAA
SVAEITNA

SEQ ID NO: 95696 - protein, 8 aa, Homo sapiens
  Table A; Target 95696; HLA-B*55:01; TUBA3C; ENSG00000198033; TAA
SVAEITNA

SEQ ID NO: 95697 - protein, 8 aa, Homo sapiens
  Table A; Target 95697; HLA-B*56:01; TUBA3C; ENSG00000198033; TAA
SVAEITNA

SEQ ID NO: 95698 - protein, 9 aa, Homo sapiens
  Table A; Target 95698; HLA-A*02:01; TUBA3C; ENSG00000198033; TAA
SVAEITNAC

SEQ ID NO: 95699 - protein, 9 aa, Homo sapiens
  Table A; Target 95699; HLA-A*02:03; TUBA3C; ENSG00000198033; TAA
SVAEITNAC

SEQ ID NO: 95700 - protein, 9 aa, Homo sapiens
  Table A; Target 95700; HLA-A*25:01; TUBA3C; ENSG00000198033; TAA
SVAEITNAC

SEQ ID NO: 95701 - protein, 9 aa, Homo sapiens
  Table A; Target 95701; HLA-A*26:01; TUBA3C; ENSG00000198033; TAA
SVAEITNAC

SEQ ID NO: 95702 - protein, 9 aa, Homo sapiens
  Table A; Target 95702; HLA-A*30:01; TUBA3C; ENSG00000198033; TAA
SVAEITNAC

SEQ ID NO: 95703 - protein, 9 aa, Homo sapiens
  Table A; Target 95703; HLA-A*32:01; TUBA3C; ENSG00000198033; TAA
SVAEITNAC

SEQ ID NO: 95704 - protein, 9 aa, Homo sapiens
  Table A; Target 95704; HLA-A*68:02; TUBA3C; ENSG00000198033; TAA
SVAEITNAC

SEQ ID NO: 95705 - protein, 9 aa, Homo sapiens
  Table A; Target 95705; HLA-B*13:02; TUBA3C; ENSG00000198033; TAA
SVAEITNAC

SEQ ID NO: 95706 - protein, 9 aa, Homo sapiens
  Table A; Target 95706; HLA-B*15:01; TUBA3C; ENSG00000198033; TAA
SVAEITNAC

SEQ ID NO: 95707 - protein, 9 aa, Homo sapiens
  Table A; Target 95707; HLA-B*27:05; TUBA3C; ENSG00000198033; TAA
SVAEITNAC

SEQ ID NO: 95708 - protein, 9 aa, Homo sapiens
  Table A; Target 95708; HLA-B*35:01; TUBA3C; ENSG00000198033; TAA
SVAEITNAC

SEQ ID NO: 95709 - protein, 9 aa, Homo sapiens
  Table A; Target 95709; HLA-B*35:03; TUBA3C; ENSG00000198033; TAA
SVAEITNAC

SEQ ID NO: 95710 - protein, 9 aa, Homo sapiens
  Table A; Target 95710; HLA-B*39:01; TUBA3C; ENSG00000198033; TAA
SVAEITNAC

SEQ ID NO: 95711 - protein, 9 aa, Homo sapiens
  Table A; Target 95711; HLA-B*46:01; TUBA3C; ENSG00000198033; TAA
SVAEITNAC

SEQ ID NO: 95712 - protein, 9 aa, Homo sapiens
  Table A; Target 95712; HLA-B*55:01; TUBA3C; ENSG00000198033; TAA
SVAEITNAC

SEQ ID NO: 95713 - protein, 9 aa, Homo sapiens
  Table A; Target 95713; HLA-B*56:01; TUBA3C; ENSG00000198033; TAA
SVAEITNAC

SEQ ID NO: 95714 - protein, 9 aa, Homo sapiens
  Table A; Target 95714; HLA-B*58:01; TUBA3C; ENSG00000198033; TAA
SVAEITNAC

SEQ ID NO: 95715 - protein, 9 aa, Homo sapiens
  Table A; Target 95715; HLA-C*01:02; TUBA3C; ENSG00000198033; TAA
SVAEITNAC

SEQ ID NO: 95716 - protein, 9 aa, Homo sapiens
  Table A; Target 95716; HLA-C*02:02; TUBA3C; ENSG00000198033; TAA
SVAEITNAC

SEQ ID NO: 95717 - protein, 9 aa, Homo sapiens
  Table A; Target 95717; HLA-C*03:03; TUBA3C; ENSG00000198033; TAA
SVAEITNAC

SEQ ID NO: 95718 - protein, 9 aa, Homo sapiens
  Table A; Target 95718; HLA-C*03:04; TUBA3C; ENSG00000198033; TAA
SVAEITNAC

SEQ ID NO: 95719 - protein, 9 aa, Homo sapiens
  Table A; Target 95719; HLA-C*06:02; TUBA3C; ENSG00000198033; TAA
SVAEITNAC

SEQ ID NO: 95720 - protein, 9 aa, Homo sapiens
  Table A; Target 95720; HLA-C*07:04; TUBA3C; ENSG00000198033; TAA
SVAEITNAC

SEQ ID NO: 95721 - protein, 9 aa, Homo sapiens
  Table A; Target 95721; HLA-C*07:06; TUBA3C; ENSG00000198033; TAA
SVAEITNAC

SEQ ID NO: 95722 - protein, 9 aa, Homo sapiens
  Table A; Target 95722; HLA-C*12:03; TUBA3C; ENSG00000198033; TAA
SVAEITNAC

SEQ ID NO: 95723 - protein, 9 aa, Homo sapiens
  Table A; Target 95723; HLA-C*16:02; TUBA3C; ENSG00000198033; TAA
SVAEITNAC

SEQ ID NO: 95724 - protein, 9 aa, Homo sapiens
  Table A; Target 95724; HLA-C*16:04; TUBA3C; ENSG00000198033; TAA
SVAEITNAC

SEQ ID NO: 95725 - protein, 10 aa, Homo sapiens
  Table A; Target 95725; HLA-A*02:01; TUBA3C; ENSG00000198033; TAA
SVAEITNACF

SEQ ID NO: 95726 - protein, 10 aa, Homo sapiens
  Table A; Target 95726; HLA-A*03:02; TUBA3C; ENSG00000198033; TAA
SVAEITNACF

SEQ ID NO: 95727 - protein, 10 aa, Homo sapiens
  Table A; Target 95727; HLA-A*11:01; TUBA3C; ENSG00000198033; TAA
SVAEITNACF

SEQ ID NO: 95728 - protein, 10 aa, Homo sapiens
  Table A; Target 95728; HLA-A*23:01; TUBA3C; ENSG00000198033; TAA
SVAEITNACF

SEQ ID NO: 95729 - protein, 10 aa, Homo sapiens
  Table A; Target 95729; HLA-A*25:01; TUBA3C; ENSG00000198033; TAA
SVAEITNACF

SEQ ID NO: 95730 - protein, 10 aa, Homo sapiens
  Table A; Target 95730; HLA-A*26:01; TUBA3C; ENSG00000198033; TAA
SVAEITNACF

SEQ ID NO: 95731 - protein, 10 aa, Homo sapiens
  Table A; Target 95731; HLA-A*29:02; TUBA3C; ENSG00000198033; TAA
SVAEITNACF

SEQ ID NO: 95732 - protein, 10 aa, Homo sapiens
  Table A; Target 95732; HLA-A*30:02; TUBA3C; ENSG00000198033; TAA
SVAEITNACF

SEQ ID NO: 95733 - protein, 10 aa, Homo sapiens
  Table A; Target 95733; HLA-A*32:01; TUBA3C; ENSG00000198033; TAA
SVAEITNACF

SEQ ID NO: 95734 - protein, 10 aa, Homo sapiens
  Table A; Target 95734; HLA-A*33:03; TUBA3C; ENSG00000198033; TAA
SVAEITNACF

SEQ ID NO: 95735 - protein, 10 aa, Homo sapiens
  Table A; Target 95735; HLA-A*68:01; TUBA3C; ENSG00000198033; TAA
SVAEITNACF

SEQ ID NO: 95736 - protein, 10 aa, Homo sapiens
  Table A; Target 95736; HLA-A*68:02; TUBA3C; ENSG00000198033; TAA
SVAEITNACF

SEQ ID NO: 95737 - protein, 10 aa, Homo sapiens
  Table A; Target 95737; HLA-B*07:02; TUBA3C; ENSG00000198033; TAA
SVAEITNACF

SEQ ID NO: 95738 - protein, 10 aa, Homo sapiens
  Table A; Target 95738; HLA-B*13:02; TUBA3C; ENSG00000198033; TAA
SVAEITNACF

SEQ ID NO: 95739 - protein, 10 aa, Homo sapiens
  Table A; Target 95739; HLA-B*15:01; TUBA3C; ENSG00000198033; TAA
SVAEITNACF

SEQ ID NO: 95740 - protein, 10 aa, Homo sapiens
  Table A; Target 95740; HLA-B*15:03; TUBA3C; ENSG00000198033; TAA
SVAEITNACF

SEQ ID NO: 95741 - protein, 10 aa, Homo sapiens
  Table A; Target 95741; HLA-B*18:01; TUBA3C; ENSG00000198033; TAA
SVAEITNACF

SEQ ID NO: 95742 - protein, 10 aa, Homo sapiens
  Table A; Target 95742; HLA-B*27:02; TUBA3C; ENSG00000198033; TAA
SVAEITNACF

SEQ ID NO: 95743 - protein, 10 aa, Homo sapiens
  Table A; Target 95743; HLA-B*27:05; TUBA3C; ENSG00000198033; TAA
SVAEITNACF

SEQ ID NO: 95744 - protein, 10 aa, Homo sapiens
  Table A; Target 95744; HLA-B*35:01; TUBA3C; ENSG00000198033; TAA
SVAEITNACF

SEQ ID NO: 95745 - protein, 10 aa, Homo sapiens
  Table A; Target 95745; HLA-B*35:03; TUBA3C; ENSG00000198033; TAA
SVAEITNACF

SEQ ID NO: 95746 - protein, 10 aa, Homo sapiens
  Table A; Target 95746; HLA-B*38:01; TUBA3C; ENSG00000198033; TAA
SVAEITNACF

SEQ ID NO: 95747 - protein, 10 aa, Homo sapiens
  Table A; Target 95747; HLA-B*39:01; TUBA3C; ENSG00000198033; TAA
SVAEITNACF

SEQ ID NO: 95748 - protein, 10 aa, Homo sapiens
  Table A; Target 95748; HLA-B*44:02; TUBA3C; ENSG00000198033; TAA
SVAEITNACF

SEQ ID NO: 95749 - protein, 10 aa, Homo sapiens
  Table A; Target 95749; HLA-B*44:03; TUBA3C; ENSG00000198033; TAA
SVAEITNACF

SEQ ID NO: 95750 - protein, 10 aa, Homo sapiens
  Table A; Target 95750; HLA-B*46:01; TUBA3C; ENSG00000198033; TAA
SVAEITNACF

SEQ ID NO: 95751 - protein, 10 aa, Homo sapiens
  Table A; Target 95751; HLA-B*55:01; TUBA3C; ENSG00000198033; TAA
SVAEITNACF

SEQ ID NO: 95752 - protein, 10 aa, Homo sapiens
  Table A; Target 95752; HLA-B*57:01; TUBA3C; ENSG00000198033; TAA
SVAEITNACF

SEQ ID NO: 95753 - protein, 10 aa, Homo sapiens
  Table A; Target 95753; HLA-B*58:01; TUBA3C; ENSG00000198033; TAA
SVAEITNACF

SEQ ID NO: 95754 - protein, 10 aa, Homo sapiens
  Table A; Target 95754; HLA-C*01:02; TUBA3C; ENSG00000198033; TAA
SVAEITNACF

SEQ ID NO: 95755 - protein, 10 aa, Homo sapiens
  Table A; Target 95755; HLA-C*02:02; TUBA3C; ENSG00000198033; TAA
SVAEITNACF

SEQ ID NO: 95756 - protein, 10 aa, Homo sapiens
  Table A; Target 95756; HLA-C*03:03; TUBA3C; ENSG00000198033; TAA
SVAEITNACF

SEQ ID NO: 95757 - protein, 10 aa, Homo sapiens
  Table A; Target 95757; HLA-C*04:01; TUBA3C; ENSG00000198033; TAA
SVAEITNACF

SEQ ID NO: 95758 - protein, 10 aa, Homo sapiens
  Table A; Target 95758; HLA-C*05:01; TUBA3C; ENSG00000198033; TAA
SVAEITNACF

SEQ ID NO: 95759 - protein, 10 aa, Homo sapiens
  Table A; Target 95759; HLA-C*07:04; TUBA3C; ENSG00000198033; TAA
SVAEITNACF

SEQ ID NO: 95760 - protein, 10 aa, Homo sapiens
  Table A; Target 95760; HLA-C*07:06; TUBA3C; ENSG00000198033; TAA
SVAEITNACF

SEQ ID NO: 95761 - protein, 10 aa, Homo sapiens
  Table A; Target 95761; HLA-C*14:02; TUBA3C; ENSG00000198033; TAA
SVAEITNACF

SEQ ID NO: 95762 - protein, 10 aa, Homo sapiens
  Table A; Target 95762; HLA-C*16:01; TUBA3C; ENSG00000198033; TAA
SVAEITNACF

SEQ ID NO: 95763 - protein, 10 aa, Homo sapiens
  Table A; Target 95763; HLA-C*16:04; TUBA3C; ENSG00000198033; TAA
SVAEITNACF

SEQ ID NO: 95764 - protein, 9 aa, Homo sapiens
  Table A; Target 95764; HLA-A*03:01; TUBA3C; ENSG00000198033; TAA
SVDYGKKSK

SEQ ID NO: 95765 - protein, 9 aa, Homo sapiens
  Table A; Target 95765; HLA-A*03:02; TUBA3C; ENSG00000198033; TAA
SVDYGKKSK

SEQ ID NO: 95766 - protein, 9 aa, Homo sapiens
  Table A; Target 95766; HLA-A*11:01; TUBA3C; ENSG00000198033; TAA
SVDYGKKSK

SEQ ID NO: 95767 - protein, 9 aa, Homo sapiens
  Table A; Target 95767; HLA-A*31:01; TUBA3C; ENSG00000198033; TAA
SVDYGKKSK

SEQ ID NO: 95768 - protein, 9 aa, Homo sapiens
  Table A; Target 95768; HLA-B*07:02; TUBA3C; ENSG00000198033; TAA
SVDYGKKSK

SEQ ID NO: 95769 - protein, 9 aa, Homo sapiens
  Table A; Target 95769; HLA-C*01:02; TUBA3C; ENSG00000198033; TAA
SVDYGKKSK

SEQ ID NO: 95770 - protein, 9 aa, Homo sapiens
  Table A; Target 95770; HLA-C*04:01; TUBA3C; ENSG00000198033; TAA
SVDYGKKSK

SEQ ID NO: 95771 - protein, 9 aa, Homo sapiens
  Table A; Target 95771; HLA-C*06:02; TUBA3C; ENSG00000198033; TAA
SVDYGKKSK

SEQ ID NO: 95772 - protein, 10 aa, Homo sapiens
  Table A; Target 95772; HLA-A*02:07; TUBA3C; ENSG00000198033; TAA
SVDYGKKSKL

SEQ ID NO: 95773 - protein, 10 aa, Homo sapiens
  Table A; Target 95773; HLA-A*03:01; TUBA3C; ENSG00000198033; TAA
SVDYGKKSKL

SEQ ID NO: 95774 - protein, 9 aa, Homo sapiens
  Table A; Target 95774; HLA-A*11:01; TUBA3C; ENSG00000198033; TAA
TAIAEAWAR

SEQ ID NO: 95775 - protein, 9 aa, Homo sapiens
  Table A; Target 95775; HLA-A*31:01; TUBA3C; ENSG00000198033; TAA
TAIAEAWAR

SEQ ID NO: 95776 - protein, 9 aa, Homo sapiens
  Table A; Target 95776; HLA-A*33:01; TUBA3C; ENSG00000198033; TAA
TAIAEAWAR

SEQ ID NO: 95777 - protein, 9 aa, Homo sapiens
  Table A; Target 95777; HLA-A*33:03; TUBA3C; ENSG00000198033; TAA
TAIAEAWAR

SEQ ID NO: 95778 - protein, 9 aa, Homo sapiens
  Table A; Target 95778; HLA-A*68:01; TUBA3C; ENSG00000198033; TAA
TAIAEAWAR

SEQ ID NO: 95779 - protein, 9 aa, Homo sapiens
  Table A; Target 95779; HLA-A*68:02; TUBA3C; ENSG00000198033; TAA
TAIAEAWAR

SEQ ID NO: 95780 - protein, 9 aa, Homo sapiens
  Table A; Target 95780; HLA-B*27:02; TUBA3C; ENSG00000198033; TAA
TAIAEAWAR

SEQ ID NO: 95781 - protein, 9 aa, Homo sapiens
  Table A; Target 95781; HLA-B*27:05; TUBA3C; ENSG00000198033; TAA
TAIAEAWAR

SEQ ID NO: 95782 - protein, 9 aa, Homo sapiens
  Table A; Target 95782; HLA-B*35:01; TUBA3C; ENSG00000198033; TAA
TAIAEAWAR

SEQ ID NO: 95783 - protein, 9 aa, Homo sapiens
  Table A; Target 95783; HLA-B*35:03; TUBA3C; ENSG00000198033; TAA
TAIAEAWAR

SEQ ID NO: 95784 - protein, 9 aa, Homo sapiens
  Table A; Target 95784; HLA-B*54:01; TUBA3C; ENSG00000198033; TAA
TAIAEAWAR

SEQ ID NO: 95785 - protein, 9 aa, Homo sapiens
  Table A; Target 95785; HLA-B*57:01; TUBA3C; ENSG00000198033; TAA
TAIAEAWAR

SEQ ID NO: 95786 - protein, 9 aa, Homo sapiens
  Table A; Target 95786; HLA-C*07:06; TUBA3C; ENSG00000198033; TAA
TAIAEAWAR

SEQ ID NO: 95787 - protein, 10 aa, Homo sapiens
  Table A; Target 95787; HLA-A*68:02; TUBA3C; ENSG00000198033; TAA
TAIAEAWARL

SEQ ID NO: 95788 - protein, 10 aa, Homo sapiens
  Table A; Target 95788; HLA-B*35:03; TUBA3C; ENSG00000198033; TAA
TAIAEAWARL

SEQ ID NO: 95789 - protein, 8 aa, Homo sapiens
  Table A; Target 95789; HLA-C*16:01; TUBA3C; ENSG00000198033; TAA
TASLRFDG

SEQ ID NO: 95790 - protein, 9 aa, Homo sapiens
  Table A; Target 95790; HLA-B*54:01; TUBA3C; ENSG00000198033; TAA
TASLRFDGA

SEQ ID NO: 95791 - protein, 9 aa, Homo sapiens
  Table A; Target 95791; HLA-C*16:01; TUBA3C; ENSG00000198033; TAA
TASLRFDGA

SEQ ID NO: 95792 - protein, 10 aa, Homo sapiens
  Table A; Target 95792; HLA-B*40:02; TUBA3C; ENSG00000198033; TAA
TASLRFDGAL

SEQ ID NO: 95793 - protein, 8 aa, Homo sapiens
  Table A; Target 95793; HLA-C*06:02; TUBA3C; ENSG00000198033; TAA
TAVVEPYN

SEQ ID NO: 95794 - protein, 8 aa, Homo sapiens
  Table A; Target 95794; HLA-C*07:01; TUBA3C; ENSG00000198033; TAA
TAVVEPYN

SEQ ID NO: 95795 - protein, 8 aa, Homo sapiens
  Table A; Target 95795; HLA-C*12:03; TUBA3C; ENSG00000198033; TAA
TAVVEPYN

SEQ ID NO: 95796 - protein, 9 aa, Homo sapiens
  Table A; Target 95796; HLA-B*39:01; TUBA3C; ENSG00000198033; TAA
TAVVEPYNS

SEQ ID NO: 95797 - protein, 10 aa, Homo sapiens
  Table A; Target 95797; HLA-A*25:01; TUBA3C; ENSG00000198033; TAA
TAVVEPYNSI

SEQ ID NO: 95798 - protein, 10 aa, Homo sapiens
  Table A; Target 95798; HLA-B*35:01; TUBA3C; ENSG00000198033; TAA
TAVVEPYNSI

SEQ ID NO: 95799 - protein, 10 aa, Homo sapiens
  Table A; Target 95799; HLA-B*35:03; TUBA3C; ENSG00000198033; TAA
TAVVEPYNSI

SEQ ID NO: 95800 - protein, 10 aa, Homo sapiens
  Table A; Target 95800; HLA-B*38:01; TUBA3C; ENSG00000198033; TAA
TAVVEPYNSI

SEQ ID NO: 95801 - protein, 10 aa, Homo sapiens
  Table A; Target 95801; HLA-B*39:01; TUBA3C; ENSG00000198033; TAA
TAVVEPYNSI

SEQ ID NO: 95802 - protein, 10 aa, Homo sapiens
  Table A; Target 95802; HLA-B*51:01; TUBA3C; ENSG00000198033; TAA
TAVVEPYNSI

SEQ ID NO: 95803 - protein, 10 aa, Homo sapiens
  Table A; Target 95803; HLA-B*54:01; TUBA3C; ENSG00000198033; TAA
TAVVEPYNSI

SEQ ID NO: 95804 - protein, 10 aa, Homo sapiens
  Table A; Target 95804; HLA-B*58:01; TUBA3C; ENSG00000198033; TAA
TAVVEPYNSI

SEQ ID NO: 95805 - protein, 10 aa, Homo sapiens
  Table A; Target 95805; HLA-C*03:03; TUBA3C; ENSG00000198033; TAA
TAVVEPYNSI

SEQ ID NO: 95806 - protein, 10 aa, Homo sapiens
  Table A; Target 95806; HLA-C*03:04; TUBA3C; ENSG00000198033; TAA
TAVVEPYNSI

SEQ ID NO: 95807 - protein, 10 aa, Homo sapiens
  Table A; Target 95807; HLA-C*05:01; TUBA3C; ENSG00000198033; TAA
TAVVEPYNSI

SEQ ID NO: 95808 - protein, 10 aa, Homo sapiens
  Table A; Target 95808; HLA-C*07:06; TUBA3C; ENSG00000198033; TAA
TAVVEPYNSI

SEQ ID NO: 95809 - protein, 10 aa, Homo sapiens
  Table A; Target 95809; HLA-C*16:04; TUBA3C; ENSG00000198033; TAA
TAVVEPYNSI

SEQ ID NO: 95810 - protein, 11 aa, Homo sapiens
  Table A; Target 95810; HLA-B*35:03; TUBA3C; ENSG00000198033; TAA
TAVVEPYNSIL

SEQ ID NO: 95811 - protein, 11 aa, Homo sapiens
  Table A; Target 95811; HLA-C*03:03; TUBA3C; ENSG00000198033; TAA
TAVVEPYNSIL

SEQ ID NO: 95812 - protein, 11 aa, Homo sapiens
  Table A; Target 95812; HLA-C*04:01; TUBA3C; ENSG00000198033; TAA
TAVVEPYNSIL

SEQ ID NO: 95813 - protein, 11 aa, Homo sapiens
  Table A; Target 95813; HLA-C*06:02; TUBA3C; ENSG00000198033; TAA
TAVVEPYNSIL

SEQ ID NO: 95814 - protein, 11 aa, Homo sapiens
  Table A; Target 95814; HLA-C*07:01; TUBA3C; ENSG00000198033; TAA
TAVVEPYNSIL

SEQ ID NO: 95815 - protein, 8 aa, Homo sapiens
  Table A; Target 95815; HLA-A*30:01; TUBA3C; ENSG00000198033; TAA
TEFQTNLV

SEQ ID NO: 95816 - protein, 8 aa, Homo sapiens
  Table A; Target 95816; HLA-B*13:02; TUBA3C; ENSG00000198033; TAA
TEFQTNLV

SEQ ID NO: 95817 - protein, 8 aa, Homo sapiens
  Table A; Target 95817; HLA-B*18:01; TUBA3C; ENSG00000198033; TAA
TEFQTNLV

SEQ ID NO: 95818 - protein, 8 aa, Homo sapiens
  Table A; Target 95818; HLA-B*37:01; TUBA3C; ENSG00000198033; TAA
TEFQTNLV

SEQ ID NO: 95819 - protein, 8 aa, Homo sapiens
  Table A; Target 95819; HLA-B*40:01; TUBA3C; ENSG00000198033; TAA
TEFQTNLV

SEQ ID NO: 95820 - protein, 8 aa, Homo sapiens
  Table A; Target 95820; HLA-B*40:02; TUBA3C; ENSG00000198033; TAA
TEFQTNLV

SEQ ID NO: 95821 - protein, 8 aa, Homo sapiens
  Table A; Target 95821; HLA-B*49:01; TUBA3C; ENSG00000198033; TAA
TEFQTNLV

SEQ ID NO: 95822 - protein, 8 aa, Homo sapiens
  Table A; Target 95822; HLA-B*51:01; TUBA3C; ENSG00000198033; TAA
TEFQTNLV

SEQ ID NO: 95823 - protein, 9 aa, Homo sapiens
  Table A; Target 95823; HLA-A*30:01; TUBA3C; ENSG00000198033; TAA
TEFQTNLVP

SEQ ID NO: 95824 - protein, 9 aa, Homo sapiens
  Table A; Target 95824; HLA-B*18:01; TUBA3C; ENSG00000198033; TAA
TEFQTNLVP

SEQ ID NO: 95825 - protein, 9 aa, Homo sapiens
  Table A; Target 95825; HLA-B*27:05; TUBA3C; ENSG00000198033; TAA
TEFQTNLVP

SEQ ID NO: 95826 - protein, 9 aa, Homo sapiens
  Table A; Target 95826; HLA-B*40:02; TUBA3C; ENSG00000198033; TAA
TEFQTNLVP

SEQ ID NO: 95827 - protein, 9 aa, Homo sapiens
  Table A; Target 95827; HLA-B*44:03; TUBA3C; ENSG00000198033; TAA
TEFQTNLVP

SEQ ID NO: 95828 - protein, 9 aa, Homo sapiens
  Table A; Target 95828; HLA-B*49:01; TUBA3C; ENSG00000198033; TAA
TEFQTNLVP

SEQ ID NO: 95829 - protein, 10 aa, Homo sapiens
  Table A; Target 95829; HLA-A*26:01; TUBA3C; ENSG00000198033; TAA
TEFQTNLVPY

SEQ ID NO: 95830 - protein, 10 aa, Homo sapiens
  Table A; Target 95830; HLA-A*30:01; TUBA3C; ENSG00000198033; TAA
TEFQTNLVPY

SEQ ID NO: 95831 - protein, 10 aa, Homo sapiens
  Table A; Target 95831; HLA-B*15:03; TUBA3C; ENSG00000198033; TAA
TEFQTNLVPY

SEQ ID NO: 95832 - protein, 10 aa, Homo sapiens
  Table A; Target 95832; HLA-B*18:01; TUBA3C; ENSG00000198033; TAA
TEFQTNLVPY

SEQ ID NO: 95833 - protein, 10 aa, Homo sapiens
  Table A; Target 95833; HLA-B*27:02; TUBA3C; ENSG00000198033; TAA
TEFQTNLVPY

SEQ ID NO: 95834 - protein, 10 aa, Homo sapiens
  Table A; Target 95834; HLA-B*35:01; TUBA3C; ENSG00000198033; TAA
TEFQTNLVPY

SEQ ID NO: 95835 - protein, 10 aa, Homo sapiens
  Table A; Target 95835; HLA-B*40:02; TUBA3C; ENSG00000198033; TAA
TEFQTNLVPY

SEQ ID NO: 95836 - protein, 10 aa, Homo sapiens
  Table A; Target 95836; HLA-B*44:02; TUBA3C; ENSG00000198033; TAA
TEFQTNLVPY

SEQ ID NO: 95837 - protein, 10 aa, Homo sapiens
  Table A; Target 95837; HLA-B*44:03; TUBA3C; ENSG00000198033; TAA
TEFQTNLVPY

SEQ ID NO: 95838 - protein, 10 aa, Homo sapiens
  Table A; Target 95838; HLA-B*49:01; TUBA3C; ENSG00000198033; TAA
TEFQTNLVPY

SEQ ID NO: 95839 - protein, 10 aa, Homo sapiens
  Table A; Target 95839; HLA-C*02:02; TUBA3C; ENSG00000198033; TAA
TEFQTNLVPY

SEQ ID NO: 95840 - protein, 10 aa, Homo sapiens
  Table A; Target 95840; HLA-C*04:01; TUBA3C; ENSG00000198033; TAA
TEFQTNLVPY

SEQ ID NO: 95841 - protein, 10 aa, Homo sapiens
  Table A; Target 95841; HLA-C*06:02; TUBA3C; ENSG00000198033; TAA
TEFQTNLVPY

SEQ ID NO: 95842 - protein, 10 aa, Homo sapiens
  Table A; Target 95842; HLA-C*07:01; TUBA3C; ENSG00000198033; TAA
TEFQTNLVPY

SEQ ID NO: 95843 - protein, 10 aa, Homo sapiens
  Table A; Target 95843; HLA-C*07:04; TUBA3C; ENSG00000198033; TAA
TEFQTNLVPY

SEQ ID NO: 95844 - protein, 10 aa, Homo sapiens
  Table A; Target 95844; HLA-C*12:03; TUBA3C; ENSG00000198033; TAA
TEFQTNLVPY

SEQ ID NO: 95845 - protein, 10 aa, Homo sapiens
  Table A; Target 95845; HLA-C*14:02; TUBA3C; ENSG00000198033; TAA
TEFQTNLVPY

SEQ ID NO: 95846 - protein, 10 aa, Homo sapiens
  Table A; Target 95846; HLA-C*16:04; TUBA3C; ENSG00000198033; TAA
TEFQTNLVPY

SEQ ID NO: 95847 - protein, 8 aa, Homo sapiens
  Table A; Target 95847; HLA-C*14:02; TUBA3C; ENSG00000198033; TAA
TFFSETGA

SEQ ID NO: 95848 - protein, 9 aa, Homo sapiens
  Table A; Target 95848; HLA-C*04:01; TUBA3C; ENSG00000198033; TAA
TFFSETGAG

SEQ ID NO: 95849 - protein, 9 aa, Homo sapiens
  Table A; Target 95849; HLA-C*06:02; TUBA3C; ENSG00000198033; TAA
TFFSETGAG

SEQ ID NO: 95850 - protein, 9 aa, Homo sapiens
  Table A; Target 95850; HLA-C*07:01; TUBA3C; ENSG00000198033; TAA
TFFSETGAG

SEQ ID NO: 95851 - protein, 9 aa, Homo sapiens
  Table A; Target 95851; HLA-C*14:02; TUBA3C; ENSG00000198033; TAA
TFFSETGAG

SEQ ID NO: 95852 - protein, 10 aa, Homo sapiens
  Table A; Target 95852; HLA-A*03:02; TUBA3C; ENSG00000198033; TAA
TFFSETGAGK

SEQ ID NO: 95853 - protein, 10 aa, Homo sapiens
  Table A; Target 95853; HLA-A*31:01; TUBA3C; ENSG00000198033; TAA
TFFSETGAGK

SEQ ID NO: 95854 - protein, 10 aa, Homo sapiens
  Table A; Target 95854; HLA-A*33:03; TUBA3C; ENSG00000198033; TAA
TFFSETGAGK

SEQ ID NO: 95855 - protein, 10 aa, Homo sapiens
  Table A; Target 95855; HLA-A*68:01; TUBA3C; ENSG00000198033; TAA
TFFSETGAGK

SEQ ID NO: 95856 - protein, 10 aa, Homo sapiens
  Table A; Target 95856; HLA-B*27:02; TUBA3C; ENSG00000198033; TAA
TFFSETGAGK

SEQ ID NO: 95857 - protein, 10 aa, Homo sapiens
  Table A; Target 95857; HLA-B*27:05; TUBA3C; ENSG00000198033; TAA
TFFSETGAGK

SEQ ID NO: 95858 - protein, 10 aa, Homo sapiens
  Table A; Target 95858; HLA-C*04:01; TUBA3C; ENSG00000198033; TAA
TFFSETGAGK

SEQ ID NO: 95859 - protein, 11 aa, Homo sapiens
  Table A; Target 95859; HLA-A*29:02; TUBA3C; ENSG00000198033; TAA
TFFSETGAGKH

SEQ ID NO: 95860 - protein, 11 aa, Homo sapiens
  Table A; Target 95860; HLA-C*06:02; TUBA3C; ENSG00000198033; TAA
TFFSETGAGKH

SEQ ID NO: 95861 - protein, 11 aa, Homo sapiens
  Table A; Target 95861; HLA-C*07:01; TUBA3C; ENSG00000198033; TAA
TFFSETGAGKH

SEQ ID NO: 95862 - protein, 8 aa, Homo sapiens
  Table A; Target 95862; HLA-C*06:02; TUBA3C; ENSG00000198033; TAA
TGAGKHVP

SEQ ID NO: 95863 - protein, 8 aa, Homo sapiens
  Table A; Target 95863; HLA-C*07:04; TUBA3C; ENSG00000198033; TAA
TGAGKHVP

SEQ ID NO: 95864 - protein, 8 aa, Homo sapiens
  Table A; Target 95864; HLA-C*16:01; TUBA3C; ENSG00000198033; TAA
TGAGKHVP

SEQ ID NO: 95865 - protein, 8 aa, Homo sapiens
  Table A; Target 95865; HLA-C*16:02; TUBA3C; ENSG00000198033; TAA
TGAGKHVP

SEQ ID NO: 95866 - protein, 9 aa, Homo sapiens
  Table A; Target 95866; HLA-A*11:01; TUBA3C; ENSG00000198033; TAA
TGAGKHVPR

SEQ ID NO: 95867 - protein, 9 aa, Homo sapiens
  Table A; Target 95867; HLA-A*31:01; TUBA3C; ENSG00000198033; TAA
TGAGKHVPR

SEQ ID NO: 95868 - protein, 9 aa, Homo sapiens
  Table A; Target 95868; HLA-A*33:01; TUBA3C; ENSG00000198033; TAA
TGAGKHVPR

SEQ ID NO: 95869 - protein, 9 aa, Homo sapiens
  Table A; Target 95869; HLA-A*33:03; TUBA3C; ENSG00000198033; TAA
TGAGKHVPR

SEQ ID NO: 95870 - protein, 9 aa, Homo sapiens
  Table A; Target 95870; HLA-A*68:01; TUBA3C; ENSG00000198033; TAA
TGAGKHVPR

SEQ ID NO: 95871 - protein, 9 aa, Homo sapiens
  Table A; Target 95871; HLA-B*27:05; TUBA3C; ENSG00000198033; TAA
TGAGKHVPR

SEQ ID NO: 95872 - protein, 9 aa, Homo sapiens
  Table A; Target 95872; HLA-C*04:01; TUBA3C; ENSG00000198033; TAA
TGAGKHVPR

SEQ ID NO: 95873 - protein, 9 aa, Homo sapiens
  Table A; Target 95873; HLA-C*06:02; TUBA3C; ENSG00000198033; TAA
TGAGKHVPR

SEQ ID NO: 95874 - protein, 9 aa, Homo sapiens
  Table A; Target 95874; HLA-C*07:01; TUBA3C; ENSG00000198033; TAA
TGAGKHVPR

SEQ ID NO: 95875 - protein, 9 aa, Homo sapiens
  Table A; Target 95875; HLA-C*07:02; TUBA3C; ENSG00000198033; TAA
TGAGKHVPR

SEQ ID NO: 95876 - protein, 9 aa, Homo sapiens
  Table A; Target 95876; HLA-C*07:04; TUBA3C; ENSG00000198033; TAA
TGAGKHVPR

SEQ ID NO: 95877 - protein, 9 aa, Homo sapiens
  Table A; Target 95877; HLA-C*07:06; TUBA3C; ENSG00000198033; TAA
TGAGKHVPR

SEQ ID NO: 95878 - protein, 9 aa, Homo sapiens
  Table A; Target 95878; HLA-C*16:01; TUBA3C; ENSG00000198033; TAA
TGAGKHVPR

SEQ ID NO: 95879 - protein, 9 aa, Homo sapiens
  Table A; Target 95879; HLA-A*23:01; TUBA3C; ENSG00000198033; TAA
TGFKVGINY

SEQ ID NO: 95880 - protein, 9 aa, Homo sapiens
  Table A; Target 95880; HLA-A*26:01; TUBA3C; ENSG00000198033; TAA
TGFKVGINY

SEQ ID NO: 95881 - protein, 9 aa, Homo sapiens
  Table A; Target 95881; HLA-A*29:02; TUBA3C; ENSG00000198033; TAA
TGFKVGINY

SEQ ID NO: 95882 - protein, 9 aa, Homo sapiens
  Table A; Target 95882; HLA-A*30:02; TUBA3C; ENSG00000198033; TAA
TGFKVGINY

SEQ ID NO: 95883 - protein, 9 aa, Homo sapiens
  Table A; Target 95883; HLA-A*31:01; TUBA3C; ENSG00000198033; TAA
TGFKVGINY

SEQ ID NO: 95884 - protein, 9 aa, Homo sapiens
  Table A; Target 95884; HLA-A*32:01; TUBA3C; ENSG00000198033; TAA
TGFKVGINY

SEQ ID NO: 95885 - protein, 9 aa, Homo sapiens
  Table A; Target 95885; HLA-B*15:01; TUBA3C; ENSG00000198033; TAA
TGFKVGINY

SEQ ID NO: 95886 - protein, 9 aa, Homo sapiens
  Table A; Target 95886; HLA-B*15:03; TUBA3C; ENSG00000198033; TAA
TGFKVGINY

SEQ ID NO: 95887 - protein, 9 aa, Homo sapiens
  Table A; Target 95887; HLA-B*18:01; TUBA3C; ENSG00000198033; TAA
TGFKVGINY

SEQ ID NO: 95888 - protein, 9 aa, Homo sapiens
  Table A; Target 95888; HLA-B*27:02; TUBA3C; ENSG00000198033; TAA
TGFKVGINY

SEQ ID NO: 95889 - protein, 9 aa, Homo sapiens
  Table A; Target 95889; HLA-B*27:05; TUBA3C; ENSG00000198033; TAA
TGFKVGINY

SEQ ID NO: 95890 - protein, 9 aa, Homo sapiens
  Table A; Target 95890; HLA-B*35:01; TUBA3C; ENSG00000198033; TAA
TGFKVGINY

SEQ ID NO: 95891 - protein, 9 aa, Homo sapiens
  Table A; Target 95891; HLA-B*44:02; TUBA3C; ENSG00000198033; TAA
TGFKVGINY

SEQ ID NO: 95892 - protein, 9 aa, Homo sapiens
  Table A; Target 95892; HLA-B*44:03; TUBA3C; ENSG00000198033; TAA
TGFKVGINY

SEQ ID NO: 95893 - protein, 9 aa, Homo sapiens
  Table A; Target 95893; HLA-B*46:01; TUBA3C; ENSG00000198033; TAA
TGFKVGINY

SEQ ID NO: 95894 - protein, 9 aa, Homo sapiens
  Table A; Target 95894; HLA-B*57:01; TUBA3C; ENSG00000198033; TAA
TGFKVGINY

SEQ ID NO: 95895 - protein, 9 aa, Homo sapiens
  Table A; Target 95895; HLA-B*58:01; TUBA3C; ENSG00000198033; TAA
TGFKVGINY

SEQ ID NO: 95896 - protein, 9 aa, Homo sapiens
  Table A; Target 95896; HLA-C*02:02; TUBA3C; ENSG00000198033; TAA
TGFKVGINY

SEQ ID NO: 95897 - protein, 9 aa, Homo sapiens
  Table A; Target 95897; HLA-C*03:03; TUBA3C; ENSG00000198033; TAA
TGFKVGINY

SEQ ID NO: 95898 - protein, 9 aa, Homo sapiens
  Table A; Target 95898; HLA-C*04:01; TUBA3C; ENSG00000198033; TAA
TGFKVGINY

SEQ ID NO: 95899 - protein, 9 aa, Homo sapiens
  Table A; Target 95899; HLA-C*06:02; TUBA3C; ENSG00000198033; TAA
TGFKVGINY

SEQ ID NO: 95900 - protein, 9 aa, Homo sapiens
  Table A; Target 95900; HLA-C*07:01; TUBA3C; ENSG00000198033; TAA
TGFKVGINY

SEQ ID NO: 95901 - protein, 9 aa, Homo sapiens
  Table A; Target 95901; HLA-C*07:02; TUBA3C; ENSG00000198033; TAA
TGFKVGINY

SEQ ID NO: 95902 - protein, 9 aa, Homo sapiens
  Table A; Target 95902; HLA-C*07:04; TUBA3C; ENSG00000198033; TAA
TGFKVGINY

SEQ ID NO: 95903 - protein, 9 aa, Homo sapiens
  Table A; Target 95903; HLA-C*07:06; TUBA3C; ENSG00000198033; TAA
TGFKVGINY

SEQ ID NO: 95904 - protein, 9 aa, Homo sapiens
  Table A; Target 95904; HLA-C*12:03; TUBA3C; ENSG00000198033; TAA
TGFKVGINY

SEQ ID NO: 95905 - protein, 9 aa, Homo sapiens
  Table A; Target 95905; HLA-C*16:01; TUBA3C; ENSG00000198033; TAA
TGFKVGINY

SEQ ID NO: 95906 - protein, 9 aa, Homo sapiens
  Table A; Target 95906; HLA-C*16:02; TUBA3C; ENSG00000198033; TAA
TGFKVGINY

SEQ ID NO: 95907 - protein, 9 aa, Homo sapiens
  Table A; Target 95907; HLA-C*16:04; TUBA3C; ENSG00000198033; TAA
TGFKVGINY

SEQ ID NO: 95908 - protein, 10 aa, Homo sapiens
  Table A; Target 95908; HLA-A*29:02; TUBA3C; ENSG00000198033; TAA
TGKEDAANNY

SEQ ID NO: 95909 - protein, 10 aa, Homo sapiens
  Table A; Target 95909; HLA-A*30:02; TUBA3C; ENSG00000198033; TAA
TGKEDAANNY

SEQ ID NO: 95910 - protein, 10 aa, Homo sapiens
  Table A; Target 95910; HLA-B*15:01; TUBA3C; ENSG00000198033; TAA
TGKEDAANNY

SEQ ID NO: 95911 - protein, 10 aa, Homo sapiens
  Table A; Target 95911; HLA-B*15:03; TUBA3C; ENSG00000198033; TAA
TGKEDAANNY

SEQ ID NO: 95912 - protein, 10 aa, Homo sapiens
  Table A; Target 95912; HLA-B*27:02; TUBA3C; ENSG00000198033; TAA
TGKEDAANNY

SEQ ID NO: 95913 - protein, 10 aa, Homo sapiens
  Table A; Target 95913; HLA-B*35:01; TUBA3C; ENSG00000198033; TAA
TGKEDAANNY

SEQ ID NO: 95914 - protein, 10 aa, Homo sapiens
  Table A; Target 95914; HLA-B*39:01; TUBA3C; ENSG00000198033; TAA
TGKEDAANNY

SEQ ID NO: 95915 - protein, 10 aa, Homo sapiens
  Table A; Target 95915; HLA-B*46:01; TUBA3C; ENSG00000198033; TAA
TGKEDAANNY

SEQ ID NO: 95916 - protein, 10 aa, Homo sapiens
  Table A; Target 95916; HLA-C*01:02; TUBA3C; ENSG00000198033; TAA
TGKEDAANNY

SEQ ID NO: 95917 - protein, 10 aa, Homo sapiens
  Table A; Target 95917; HLA-C*04:01; TUBA3C; ENSG00000198033; TAA
TGKEDAANNY

SEQ ID NO: 95918 - protein, 10 aa, Homo sapiens
  Table A; Target 95918; HLA-C*06:02; TUBA3C; ENSG00000198033; TAA
TGKEDAANNY

SEQ ID NO: 95919 - protein, 10 aa, Homo sapiens
  Table A; Target 95919; HLA-C*07:01; TUBA3C; ENSG00000198033; TAA
TGKEDAANNY

SEQ ID NO: 95920 - protein, 10 aa, Homo sapiens
  Table A; Target 95920; HLA-C*07:02; TUBA3C; ENSG00000198033; TAA
TGKEDAANNY

SEQ ID NO: 95921 - protein, 10 aa, Homo sapiens
  Table A; Target 95921; HLA-C*07:04; TUBA3C; ENSG00000198033; TAA
TGKEDAANNY

SEQ ID NO: 95922 - protein, 10 aa, Homo sapiens
  Table A; Target 95922; HLA-C*12:03; TUBA3C; ENSG00000198033; TAA
TGKEDAANNY

SEQ ID NO: 95923 - protein, 10 aa, Homo sapiens
  Table A; Target 95923; HLA-C*14:02; TUBA3C; ENSG00000198033; TAA
TGKEDAANNY

SEQ ID NO: 95924 - protein, 10 aa, Homo sapiens
  Table A; Target 95924; HLA-C*16:02; TUBA3C; ENSG00000198033; TAA
TGKEDAANNY

SEQ ID NO: 95925 - protein, 10 aa, Homo sapiens
  Table A; Target 95925; HLA-C*16:04; TUBA3C; ENSG00000198033; TAA
TGKEDAANNY

SEQ ID NO: 95926 - protein, 11 aa, Homo sapiens
  Table A; Target 95926; HLA-C*04:01; TUBA3C; ENSG00000198033; TAA
TGKEDAANNYA

SEQ ID NO: 95927 - protein, 11 aa, Homo sapiens
  Table A; Target 95927; HLA-C*06:02; TUBA3C; ENSG00000198033; TAA
TGKEDAANNYA

SEQ ID NO: 95928 - protein, 8 aa, Homo sapiens
  Table A; Target 95928; HLA-A*23:01; TUBA3C; ENSG00000198033; TAA
TGLQGFLI

SEQ ID NO: 95929 - protein, 8 aa, Homo sapiens
  Table A; Target 95929; HLA-B*51:01; TUBA3C; ENSG00000198033; TAA
TGLQGFLI

SEQ ID NO: 95930 - protein, 9 aa, Homo sapiens
  Table A; Target 95930; HLA-A*23:01; TUBA3C; ENSG00000198033; TAA
TGLQGFLIF

SEQ ID NO: 95931 - protein, 9 aa, Homo sapiens
  Table A; Target 95931; HLA-A*24:02; TUBA3C; ENSG00000198033; TAA
TGLQGFLIF

SEQ ID NO: 95932 - protein, 9 aa, Homo sapiens
  Table A; Target 95932; HLA-B*35:01; TUBA3C; ENSG00000198033; TAA
TGLQGFLIF

SEQ ID NO: 95933 - protein, 9 aa, Homo sapiens
  Table A; Target 95933; HLA-B*57:01; TUBA3C; ENSG00000198033; TAA
TGLQGFLIF

SEQ ID NO: 95934 - protein, 9 aa, Homo sapiens
  Table A; Target 95934; HLA-C*04:01; TUBA3C; ENSG00000198033; TAA
TGLQGFLIF

SEQ ID NO: 95935 - protein, 9 aa, Homo sapiens
  Table A; Target 95935; HLA-C*07:01; TUBA3C; ENSG00000198033; TAA
TGLQGFLIF

SEQ ID NO: 95936 - protein, 8 aa, Homo sapiens
  Table A; Target 95936; HLA-C*01:02; TUBA3C; ENSG00000198033; TAA
TGSGFASL

SEQ ID NO: 95937 - protein, 8 aa, Homo sapiens
  Table A; Target 95937; HLA-C*03:04; TUBA3C; ENSG00000198033; TAA
TGSGFASL

SEQ ID NO: 95938 - protein, 9 aa, Homo sapiens
  Table A; Target 95938; HLA-A*30:01; TUBA3C; ENSG00000198033; TAA
TGSGFASLL

SEQ ID NO: 95939 - protein, 9 aa, Homo sapiens
  Table A; Target 95939; HLA-A*68:02; TUBA3C; ENSG00000198033; TAA
TGSGFASLL

SEQ ID NO: 95940 - protein, 9 aa, Homo sapiens
  Table A; Target 95940; HLA-B*07:02; TUBA3C; ENSG00000198033; TAA
TGSGFASLL

SEQ ID NO: 95941 - protein, 9 aa, Homo sapiens
  Table A; Target 95941; HLA-B*13:02; TUBA3C; ENSG00000198033; TAA
TGSGFASLL

SEQ ID NO: 95942 - protein, 9 aa, Homo sapiens
  Table A; Target 95942; HLA-B*27:05; TUBA3C; ENSG00000198033; TAA
TGSGFASLL

SEQ ID NO: 95943 - protein, 9 aa, Homo sapiens
  Table A; Target 95943; HLA-B*35:01; TUBA3C; ENSG00000198033; TAA
TGSGFASLL

SEQ ID NO: 95944 - protein, 9 aa, Homo sapiens
  Table A; Target 95944; HLA-B*35:03; TUBA3C; ENSG00000198033; TAA
TGSGFASLL

SEQ ID NO: 95945 - protein, 9 aa, Homo sapiens
  Table A; Target 95945; HLA-B*38:01; TUBA3C; ENSG00000198033; TAA
TGSGFASLL

SEQ ID NO: 95946 - protein, 9 aa, Homo sapiens
  Table A; Target 95946; HLA-B*39:01; TUBA3C; ENSG00000198033; TAA
TGSGFASLL

SEQ ID NO: 95947 - protein, 9 aa, Homo sapiens
  Table A; Target 95947; HLA-B*40:01; TUBA3C; ENSG00000198033; TAA
TGSGFASLL

SEQ ID NO: 95948 - protein, 9 aa, Homo sapiens
  Table A; Target 95948; HLA-B*40:02; TUBA3C; ENSG00000198033; TAA
TGSGFASLL

SEQ ID NO: 95949 - protein, 9 aa, Homo sapiens
  Table A; Target 95949; HLA-C*01:02; TUBA3C; ENSG00000198033; TAA
TGSGFASLL

SEQ ID NO: 95950 - protein, 9 aa, Homo sapiens
  Table A; Target 95950; HLA-C*02:02; TUBA3C; ENSG00000198033; TAA
TGSGFASLL

SEQ ID NO: 95951 - protein, 9 aa, Homo sapiens
  Table A; Target 95951; HLA-C*03:03; TUBA3C; ENSG00000198033; TAA
TGSGFASLL

SEQ ID NO: 95952 - protein, 9 aa, Homo sapiens
  Table A; Target 95952; HLA-C*03:04; TUBA3C; ENSG00000198033; TAA
TGSGFASLL

SEQ ID NO: 95953 - protein, 9 aa, Homo sapiens
  Table A; Target 95953; HLA-C*04:01; TUBA3C; ENSG00000198033; TAA
TGSGFASLL

SEQ ID NO: 95954 - protein, 9 aa, Homo sapiens
  Table A; Target 95954; HLA-C*05:01; TUBA3C; ENSG00000198033; TAA
TGSGFASLL

SEQ ID NO: 95955 - protein, 9 aa, Homo sapiens
  Table A; Target 95955; HLA-C*06:02; TUBA3C; ENSG00000198033; TAA
TGSGFASLL

SEQ ID NO: 95956 - protein, 9 aa, Homo sapiens
  Table A; Target 95956; HLA-C*07:01; TUBA3C; ENSG00000198033; TAA
TGSGFASLL

SEQ ID NO: 95957 - protein, 9 aa, Homo sapiens
  Table A; Target 95957; HLA-C*07:02; TUBA3C; ENSG00000198033; TAA
TGSGFASLL

SEQ ID NO: 95958 - protein, 9 aa, Homo sapiens
  Table A; Target 95958; HLA-C*07:04; TUBA3C; ENSG00000198033; TAA
TGSGFASLL

SEQ ID NO: 95959 - protein, 9 aa, Homo sapiens
  Table A; Target 95959; HLA-C*07:06; TUBA3C; ENSG00000198033; TAA
TGSGFASLL

SEQ ID NO: 95960 - protein, 9 aa, Homo sapiens
  Table A; Target 95960; HLA-C*12:03; TUBA3C; ENSG00000198033; TAA
TGSGFASLL

SEQ ID NO: 95961 - protein, 9 aa, Homo sapiens
  Table A; Target 95961; HLA-C*14:02; TUBA3C; ENSG00000198033; TAA
TGSGFASLL

SEQ ID NO: 95962 - protein, 9 aa, Homo sapiens
  Table A; Target 95962; HLA-C*16:01; TUBA3C; ENSG00000198033; TAA
TGSGFASLL

SEQ ID NO: 95963 - protein, 9 aa, Homo sapiens
  Table A; Target 95963; HLA-C*16:02; TUBA3C; ENSG00000198033; TAA
TGSGFASLL

SEQ ID NO: 95964 - protein, 10 aa, Homo sapiens
  Table A; Target 95964; HLA-C*04:01; TUBA3C; ENSG00000198033; TAA
TGSGFASLLM

SEQ ID NO: 95965 - protein, 10 aa, Homo sapiens
  Table A; Target 95965; HLA-C*06:02; TUBA3C; ENSG00000198033; TAA
TGSGFASLLM

SEQ ID NO: 95966 - protein, 10 aa, Homo sapiens
  Table A; Target 95966; HLA-C*07:01; TUBA3C; ENSG00000198033; TAA
TGSGFASLLM

SEQ ID NO: 95967 - protein, 10 aa, Homo sapiens
  Table A; Target 95967; HLA-C*07:02; TUBA3C; ENSG00000198033; TAA
TGSGFASLLM

SEQ ID NO: 95968 - protein, 10 aa, Homo sapiens
  Table A; Target 95968; HLA-C*07:04; TUBA3C; ENSG00000198033; TAA
TGSGFASLLM

SEQ ID NO: 95969 - protein, 8 aa, Homo sapiens
  Table A; Target 95969; HLA-B*07:02; TUBA3C; ENSG00000198033; TAA
TGTYRQLF

SEQ ID NO: 95970 - protein, 8 aa, Homo sapiens
  Table A; Target 95970; HLA-B*08:01; TUBA3C; ENSG00000198033; TAA
TGTYRQLF

SEQ ID NO: 95971 - protein, 8 aa, Homo sapiens
  Table A; Target 95971; HLA-C*04:01; TUBA3C; ENSG00000198033; TAA
TGTYRQLF

SEQ ID NO: 95972 - protein, 8 aa, Homo sapiens
  Table A; Target 95972; HLA-C*07:01; TUBA3C; ENSG00000198033; TAA
TGTYRQLF

SEQ ID NO: 95973 - protein, 8 aa, Homo sapiens
  Table A; Target 95973; HLA-C*07:04; TUBA3C; ENSG00000198033; TAA
TGTYRQLF

SEQ ID NO: 95974 - protein, 8 aa, Homo sapiens
  Table A; Target 95974; HLA-C*16:01; TUBA3C; ENSG00000198033; TAA
TGTYRQLF

SEQ ID NO: 95975 - protein, 9 aa, Homo sapiens
  Table A; Target 95975; HLA-B*15:01; TUBA3C; ENSG00000198033; TAA
TIGGGDDSF

SEQ ID NO: 95976 - protein, 9 aa, Homo sapiens
  Table A; Target 95976; HLA-B*27:05; TUBA3C; ENSG00000198033; TAA
TIGGGDDSF

SEQ ID NO: 95977 - protein, 9 aa, Homo sapiens
  Table A; Target 95977; HLA-B*35:01; TUBA3C; ENSG00000198033; TAA
TIGGGDDSF

SEQ ID NO: 95978 - protein, 9 aa, Homo sapiens
  Table A; Target 95978; HLA-B*35:03; TUBA3C; ENSG00000198033; TAA
TIGGGDDSF

SEQ ID NO: 95979 - protein, 9 aa, Homo sapiens
  Table A; Target 95979; HLA-B*38:01; TUBA3C; ENSG00000198033; TAA
TIGGGDDSF

SEQ ID NO: 95980 - protein, 9 aa, Homo sapiens
  Table A; Target 95980; HLA-B*39:01; TUBA3C; ENSG00000198033; TAA
TIGGGDDSF

SEQ ID NO: 95981 - protein, 9 aa, Homo sapiens
  Table A; Target 95981; HLA-B*55:01; TUBA3C; ENSG00000198033; TAA
TIGGGDDSF

SEQ ID NO: 95982 - protein, 9 aa, Homo sapiens
  Table A; Target 95982; HLA-C*01:02; TUBA3C; ENSG00000198033; TAA
TIGGGDDSF

SEQ ID NO: 95983 - protein, 9 aa, Homo sapiens
  Table A; Target 95983; HLA-C*03:03; TUBA3C; ENSG00000198033; TAA
TIGGGDDSF

SEQ ID NO: 95984 - protein, 9 aa, Homo sapiens
  Table A; Target 95984; HLA-C*04:01; TUBA3C; ENSG00000198033; TAA
TIGGGDDSF

SEQ ID NO: 95985 - protein, 9 aa, Homo sapiens
  Table A; Target 95985; HLA-C*05:01; TUBA3C; ENSG00000198033; TAA
TIGGGDDSF

SEQ ID NO: 95986 - protein, 9 aa, Homo sapiens
  Table A; Target 95986; HLA-C*07:04; TUBA3C; ENSG00000198033; TAA
TIGGGDDSF

SEQ ID NO: 95987 - protein, 9 aa, Homo sapiens
  Table A; Target 95987; HLA-C*14:02; TUBA3C; ENSG00000198033; TAA
TIGGGDDSF

SEQ ID NO: 95988 - protein, 9 aa, Homo sapiens
  Table A; Target 95988; HLA-C*07:04; TUBA3C; ENSG00000198033; TAA
TIGKEIVDL

SEQ ID NO: 95989 - protein, 10 aa, Homo sapiens
  Table A; Target 95989; HLA-A*68:02; TUBA3C; ENSG00000198033; TAA
TIGKEIVDLV

SEQ ID NO: 95990 - protein, 8 aa, Homo sapiens
  Table A; Target 95990; HLA-B*08:01; TUBA3C; ENSG00000198033; TAA
TIKTKRTI

SEQ ID NO: 95991 - protein, 9 aa, Homo sapiens
  Table A; Target 95991; HLA-B*35:03; TUBA3C; ENSG00000198033; TAA
TLEHSDCAF

SEQ ID NO: 95992 - protein, 9 aa, Homo sapiens
  Table A; Target 95992; HLA-C*03:03; TUBA3C; ENSG00000198033; TAA
TLEHSDCAF

SEQ ID NO: 95993 - protein, 9 aa, Homo sapiens
  Table A; Target 95993; HLA-C*04:01; TUBA3C; ENSG00000198033; TAA
TLEHSDCAF

SEQ ID NO: 95994 - protein, 9 aa, Homo sapiens
  Table A; Target 95994; HLA-C*07:04; TUBA3C; ENSG00000198033; TAA
TLEHSDCAF

SEQ ID NO: 95995 - protein, 10 aa, Homo sapiens
  Table A; Target 95995; HLA-C*07:01; TUBA3C; ENSG00000198033; TAA
TLEHSDCAFM

SEQ ID NO: 95996 - protein, 11 aa, Homo sapiens
  Table A; Target 95996; HLA-B*39:01; TUBA3C; ENSG00000198033; TAA
TNACFEPANQM

SEQ ID NO: 95997 - protein, 9 aa, Homo sapiens
  Table A; Target 95997; HLA-A*33:01; TUBA3C; ENSG00000198033; TAA
TNLNRLIGQ

SEQ ID NO: 95998 - protein, 8 aa, Homo sapiens
  Table A; Target 95998; HLA-A*31:01; TUBA3C; ENSG00000198033; TAA
TNLVPYPR

SEQ ID NO: 95999 - protein, 8 aa, Homo sapiens
  Table A; Target 95999; HLA-A*33:01; TUBA3C; ENSG00000198033; TAA
TNLVPYPR

SEQ ID NO: 96000 - protein, 8 aa, Homo sapiens
  Table A; Target 96000; HLA-A*33:03; TUBA3C; ENSG00000198033; TAA
TNLVPYPR

SEQ ID NO: 96001 - protein, 9 aa, Homo sapiens
  Table A; Target 96001; HLA-B*51:01; TUBA3C; ENSG00000198033; TAA
TNLVPYPRI

SEQ ID NO: 96002 - protein, 8 aa, Homo sapiens
  Table A; Target 96002; HLA-A*25:01; TUBA3C; ENSG00000198033; TAA
TTAIAEAW

SEQ ID NO: 96003 - protein, 8 aa, Homo sapiens
  Table A; Target 96003; HLA-A*32:01; TUBA3C; ENSG00000198033; TAA
TTAIAEAW

SEQ ID NO: 96004 - protein, 8 aa, Homo sapiens
  Table A; Target 96004; HLA-A*33:03; TUBA3C; ENSG00000198033; TAA
TTAIAEAW

SEQ ID NO: 96005 - protein, 8 aa, Homo sapiens
  Table A; Target 96005; HLA-B*18:01; TUBA3C; ENSG00000198033; TAA
TTAIAEAW

SEQ ID NO: 96006 - protein, 8 aa, Homo sapiens
  Table A; Target 96006; HLA-B*27:02; TUBA3C; ENSG00000198033; TAA
TTAIAEAW

SEQ ID NO: 96007 - protein, 8 aa, Homo sapiens
  Table A; Target 96007; HLA-B*27:05; TUBA3C; ENSG00000198033; TAA
TTAIAEAW

SEQ ID NO: 96008 - protein, 8 aa, Homo sapiens
  Table A; Target 96008; HLA-B*44:02; TUBA3C; ENSG00000198033; TAA
TTAIAEAW

SEQ ID NO: 96009 - protein, 8 aa, Homo sapiens
  Table A; Target 96009; HLA-B*57:01; TUBA3C; ENSG00000198033; TAA
TTAIAEAW

SEQ ID NO: 96010 - protein, 8 aa, Homo sapiens
  Table A; Target 96010; HLA-B*58:01; TUBA3C; ENSG00000198033; TAA
TTAIAEAW

SEQ ID NO: 96011 - protein, 8 aa, Homo sapiens
  Table A; Target 96011; HLA-C*07:01; TUBA3C; ENSG00000198033; TAA
TTAIAEAW

SEQ ID NO: 96012 - protein, 8 aa, Homo sapiens
  Table A; Target 96012; HLA-C*12:03; TUBA3C; ENSG00000198033; TAA
TTAIAEAW

SEQ ID NO: 96013 - protein, 8 aa, Homo sapiens
  Table A; Target 96013; HLA-C*16:04; TUBA3C; ENSG00000198033; TAA
TTAIAEAW

SEQ ID NO: 96014 - protein, 10 aa, Homo sapiens
  Table A; Target 96014; HLA-A*31:01; TUBA3C; ENSG00000198033; TAA
TTAIAEAWAR

SEQ ID NO: 96015 - protein, 10 aa, Homo sapiens
  Table A; Target 96015; HLA-A*33:03; TUBA3C; ENSG00000198033; TAA
TTAIAEAWAR

SEQ ID NO: 96016 - protein, 10 aa, Homo sapiens
  Table A; Target 96016; HLA-A*68:01; TUBA3C; ENSG00000198033; TAA
TTAIAEAWAR

SEQ ID NO: 96017 - protein, 10 aa, Homo sapiens
  Table A; Target 96017; HLA-B*27:02; TUBA3C; ENSG00000198033; TAA
TTAIAEAWAR

SEQ ID NO: 96018 - protein, 10 aa, Homo sapiens
  Table A; Target 96018; HLA-C*07:06; TUBA3C; ENSG00000198033; TAA
TTAIAEAWAR

SEQ ID NO: 96019 - protein, 11 aa, Homo sapiens
  Table A; Target 96019; HLA-A*68:02; TUBA3C; ENSG00000198033; TAA
TTAIAEAWARL

SEQ ID NO: 96020 - protein, 11 aa, Homo sapiens
  Table A; Target 96020; HLA-C*06:02; TUBA3C; ENSG00000198033; TAA
TTAIAEAWARL

SEQ ID NO: 96021 - protein, 8 aa, Homo sapiens
  Table A; Target 96021; HLA-C*03:03; TUBA3C; ENSG00000198033; TAA
TTHTTLEH

SEQ ID NO: 96022 - protein, 8 aa, Homo sapiens
  Table A; Target 96022; HLA-C*04:01; TUBA3C; ENSG00000198033; TAA
TTHTTLEH

SEQ ID NO: 96023 - protein, 8 aa, Homo sapiens
  Table A; Target 96023; HLA-C*06:02; TUBA3C; ENSG00000198033; TAA
TTHTTLEH

SEQ ID NO: 96024 - protein, 8 aa, Homo sapiens
  Table A; Target 96024; HLA-C*07:01; TUBA3C; ENSG00000198033; TAA
TTHTTLEH

SEQ ID NO: 96025 - protein, 8 aa, Homo sapiens
  Table A; Target 96025; HLA-C*12:03; TUBA3C; ENSG00000198033; TAA
TTLEHSDC

SEQ ID NO: 96026 - protein, 10 aa, Homo sapiens
  Table A; Target 96026; HLA-A*23:01; TUBA3C; ENSG00000198033; TAA
TTLEHSDCAF

SEQ ID NO: 96027 - protein, 10 aa, Homo sapiens
  Table A; Target 96027; HLA-A*25:01; TUBA3C; ENSG00000198033; TAA
TTLEHSDCAF

SEQ ID NO: 96028 - protein, 10 aa, Homo sapiens
  Table A; Target 96028; HLA-A*32:01; TUBA3C; ENSG00000198033; TAA
TTLEHSDCAF

SEQ ID NO: 96029 - protein, 10 aa, Homo sapiens
  Table A; Target 96029; HLA-B*35:01; TUBA3C; ENSG00000198033; TAA
TTLEHSDCAF

SEQ ID NO: 96030 - protein, 10 aa, Homo sapiens
  Table A; Target 96030; HLA-B*35:03; TUBA3C; ENSG00000198033; TAA
TTLEHSDCAF

SEQ ID NO: 96031 - protein, 10 aa, Homo sapiens
  Table A; Target 96031; HLA-B*46:01; TUBA3C; ENSG00000198033; TAA
TTLEHSDCAF

SEQ ID NO: 96032 - protein, 10 aa, Homo sapiens
  Table A; Target 96032; HLA-B*57:01; TUBA3C; ENSG00000198033; TAA
TTLEHSDCAF

SEQ ID NO: 96033 - protein, 10 aa, Homo sapiens
  Table A; Target 96033; HLA-B*58:01; TUBA3C; ENSG00000198033; TAA
TTLEHSDCAF

SEQ ID NO: 96034 - protein, 10 aa, Homo sapiens
  Table A; Target 96034; HLA-C*04:01; TUBA3C; ENSG00000198033; TAA
TTLEHSDCAF

SEQ ID NO: 96035 - protein, 10 aa, Homo sapiens
  Table A; Target 96035; HLA-C*06:02; TUBA3C; ENSG00000198033; TAA
TTLEHSDCAF

SEQ ID NO: 96036 - protein, 10 aa, Homo sapiens
  Table A; Target 96036; HLA-C*07:01; TUBA3C; ENSG00000198033; TAA
TTLEHSDCAF

SEQ ID NO: 96037 - protein, 10 aa, Homo sapiens
  Table A; Target 96037; HLA-C*07:04; TUBA3C; ENSG00000198033; TAA
TTLEHSDCAF

SEQ ID NO: 96038 - protein, 9 aa, Homo sapiens
  Table A; Target 96038; HLA-C*06:02; TUBA3C; ENSG00000198033; TAA
TVVDEVRTG

SEQ ID NO: 96039 - protein, 10 aa, Homo sapiens
  Table A; Target 96039; HLA-A*32:01; TUBA3C; ENSG00000198033; TAA
TVVDEVRTGT

SEQ ID NO: 96040 - protein, 10 aa, Homo sapiens
  Table A; Target 96040; HLA-B*58:01; TUBA3C; ENSG00000198033; TAA
TVVDEVRTGT

SEQ ID NO: 96041 - protein, 11 aa, Homo sapiens
  Table A; Target 96041; HLA-A*01:01; TUBA3C; ENSG00000198033; TAA
TVVDEVRTGTY

SEQ ID NO: 96042 - protein, 11 aa, Homo sapiens
  Table A; Target 96042; HLA-A*11:01; TUBA3C; ENSG00000198033; TAA
TVVDEVRTGTY

SEQ ID NO: 96043 - protein, 11 aa, Homo sapiens
  Table A; Target 96043; HLA-A*25:01; TUBA3C; ENSG00000198033; TAA
TVVDEVRTGTY

SEQ ID NO: 96044 - protein, 11 aa, Homo sapiens
  Table A; Target 96044; HLA-A*26:01; TUBA3C; ENSG00000198033; TAA
TVVDEVRTGTY

SEQ ID NO: 96045 - protein, 11 aa, Homo sapiens
  Table A; Target 96045; HLA-A*29:02; TUBA3C; ENSG00000198033; TAA
TVVDEVRTGTY

SEQ ID NO: 96046 - protein, 11 aa, Homo sapiens
  Table A; Target 96046; HLA-A*30:02; TUBA3C; ENSG00000198033; TAA
TVVDEVRTGTY

SEQ ID NO: 96047 - protein, 11 aa, Homo sapiens
  Table A; Target 96047; HLA-A*32:01; TUBA3C; ENSG00000198033; TAA
TVVDEVRTGTY

SEQ ID NO: 96048 - protein, 11 aa, Homo sapiens
  Table A; Target 96048; HLA-A*33:03; TUBA3C; ENSG00000198033; TAA
TVVDEVRTGTY

SEQ ID NO: 96049 - protein, 11 aa, Homo sapiens
  Table A; Target 96049; HLA-A*68:01; TUBA3C; ENSG00000198033; TAA
TVVDEVRTGTY

SEQ ID NO: 96050 - protein, 11 aa, Homo sapiens
  Table A; Target 96050; HLA-B*15:01; TUBA3C; ENSG00000198033; TAA
TVVDEVRTGTY

SEQ ID NO: 96051 - protein, 11 aa, Homo sapiens
  Table A; Target 96051; HLA-B*15:03; TUBA3C; ENSG00000198033; TAA
TVVDEVRTGTY

SEQ ID NO: 96052 - protein, 11 aa, Homo sapiens
  Table A; Target 96052; HLA-B*27:02; TUBA3C; ENSG00000198033; TAA
TVVDEVRTGTY

SEQ ID NO: 96053 - protein, 11 aa, Homo sapiens
  Table A; Target 96053; HLA-B*27:05; TUBA3C; ENSG00000198033; TAA
TVVDEVRTGTY

SEQ ID NO: 96054 - protein, 11 aa, Homo sapiens
  Table A; Target 96054; HLA-B*35:01; TUBA3C; ENSG00000198033; TAA
TVVDEVRTGTY

SEQ ID NO: 96055 - protein, 11 aa, Homo sapiens
  Table A; Target 96055; HLA-B*39:01; TUBA3C; ENSG00000198033; TAA
TVVDEVRTGTY

SEQ ID NO: 96056 - protein, 11 aa, Homo sapiens
  Table A; Target 96056; HLA-B*44:02; TUBA3C; ENSG00000198033; TAA
TVVDEVRTGTY

SEQ ID NO: 96057 - protein, 11 aa, Homo sapiens
  Table A; Target 96057; HLA-B*44:03; TUBA3C; ENSG00000198033; TAA
TVVDEVRTGTY

SEQ ID NO: 96058 - protein, 11 aa, Homo sapiens
  Table A; Target 96058; HLA-B*46:01; TUBA3C; ENSG00000198033; TAA
TVVDEVRTGTY

SEQ ID NO: 96059 - protein, 11 aa, Homo sapiens
  Table A; Target 96059; HLA-B*55:01; TUBA3C; ENSG00000198033; TAA
TVVDEVRTGTY

SEQ ID NO: 96060 - protein, 11 aa, Homo sapiens
  Table A; Target 96060; HLA-B*57:01; TUBA3C; ENSG00000198033; TAA
TVVDEVRTGTY

SEQ ID NO: 96061 - protein, 11 aa, Homo sapiens
  Table A; Target 96061; HLA-B*58:01; TUBA3C; ENSG00000198033; TAA
TVVDEVRTGTY

SEQ ID NO: 96062 - protein, 11 aa, Homo sapiens
  Table A; Target 96062; HLA-C*01:02; TUBA3C; ENSG00000198033; TAA
TVVDEVRTGTY

SEQ ID NO: 96063 - protein, 11 aa, Homo sapiens
  Table A; Target 96063; HLA-C*02:02; TUBA3C; ENSG00000198033; TAA
TVVDEVRTGTY

SEQ ID NO: 96064 - protein, 11 aa, Homo sapiens
  Table A; Target 96064; HLA-C*03:03; TUBA3C; ENSG00000198033; TAA
TVVDEVRTGTY

SEQ ID NO: 96065 - protein, 11 aa, Homo sapiens
  Table A; Target 96065; HLA-C*04:01; TUBA3C; ENSG00000198033; TAA
TVVDEVRTGTY

SEQ ID NO: 96066 - protein, 11 aa, Homo sapiens
  Table A; Target 96066; HLA-C*06:02; TUBA3C; ENSG00000198033; TAA
TVVDEVRTGTY

SEQ ID NO: 96067 - protein, 11 aa, Homo sapiens
  Table A; Target 96067; HLA-C*07:01; TUBA3C; ENSG00000198033; TAA
TVVDEVRTGTY

SEQ ID NO: 96068 - protein, 11 aa, Homo sapiens
  Table A; Target 96068; HLA-C*07:04; TUBA3C; ENSG00000198033; TAA
TVVDEVRTGTY

SEQ ID NO: 96069 - protein, 11 aa, Homo sapiens
  Table A; Target 96069; HLA-C*07:06; TUBA3C; ENSG00000198033; TAA
TVVDEVRTGTY

SEQ ID NO: 96070 - protein, 11 aa, Homo sapiens
  Table A; Target 96070; HLA-C*12:03; TUBA3C; ENSG00000198033; TAA
TVVDEVRTGTY

SEQ ID NO: 96071 - protein, 11 aa, Homo sapiens
  Table A; Target 96071; HLA-C*16:01; TUBA3C; ENSG00000198033; TAA
TVVDEVRTGTY

SEQ ID NO: 96072 - protein, 11 aa, Homo sapiens
  Table A; Target 96072; HLA-C*16:02; TUBA3C; ENSG00000198033; TAA
TVVDEVRTGTY

SEQ ID NO: 96073 - protein, 11 aa, Homo sapiens
  Table A; Target 96073; HLA-C*16:04; TUBA3C; ENSG00000198033; TAA
TVVDEVRTGTY

SEQ ID NO: 96074 - protein, 8 aa, Homo sapiens
  Table A; Target 96074; HLA-B*39:01; TUBA3C; ENSG00000198033; TAA
TVVPGGDL

SEQ ID NO: 96075 - protein, 8 aa, Homo sapiens
  Table A; Target 96075; HLA-C*01:02; TUBA3C; ENSG00000198033; TAA
TVVPGGDL

SEQ ID NO: 96076 - protein, 8 aa, Homo sapiens
  Table A; Target 96076; HLA-C*03:03; TUBA3C; ENSG00000198033; TAA
TVVPGGDL

SEQ ID NO: 96077 - protein, 8 aa, Homo sapiens
  Table A; Target 96077; HLA-C*03:04; TUBA3C; ENSG00000198033; TAA
TVVPGGDL

SEQ ID NO: 96078 - protein, 8 aa, Homo sapiens
  Table A; Target 96078; HLA-C*04:01; TUBA3C; ENSG00000198033; TAA
TVVPGGDL

SEQ ID NO: 96079 - protein, 9 aa, Homo sapiens
  Table A; Target 96079; HLA-B*39:01; TUBA3C; ENSG00000198033; TAA
TVVPGGDLA

SEQ ID NO: 96080 - protein, 10 aa, Homo sapiens
  Table A; Target 96080; HLA-A*03:01; TUBA3C; ENSG00000198033; TAA
TVVPGGDLAK

SEQ ID NO: 96081 - protein, 10 aa, Homo sapiens
  Table A; Target 96081; HLA-A*03:02; TUBA3C; ENSG00000198033; TAA
TVVPGGDLAK

SEQ ID NO: 96082 - protein, 10 aa, Homo sapiens
  Table A; Target 96082; HLA-A*11:01; TUBA3C; ENSG00000198033; TAA
TVVPGGDLAK

SEQ ID NO: 96083 - protein, 10 aa, Homo sapiens
  Table A; Target 96083; HLA-A*68:01; TUBA3C; ENSG00000198033; TAA
TVVPGGDLAK

SEQ ID NO: 96084 - protein, 10 aa, Homo sapiens
  Table A; Target 96084; HLA-B*27:05; TUBA3C; ENSG00000198033; TAA
TVVPGGDLAK

SEQ ID NO: 96085 - protein, 10 aa, Homo sapiens
  Table A; Target 96085; HLA-C*03:03; TUBA3C; ENSG00000198033; TAA
TVVPGGDLAK

SEQ ID NO: 96086 - protein, 10 aa, Homo sapiens
  Table A; Target 96086; HLA-C*04:01; TUBA3C; ENSG00000198033; TAA
TVVPGGDLAK

SEQ ID NO: 96087 - protein, 10 aa, Homo sapiens
  Table A; Target 96087; HLA-C*07:06; TUBA3C; ENSG00000198033; TAA
TVVPGGDLAK

SEQ ID NO: 96088 - protein, 11 aa, Homo sapiens
  Table A; Target 96088; HLA-A*02:01; TUBA3C; ENSG00000198033; TAA
TVVPGGDLAKV

SEQ ID NO: 96089 - protein, 11 aa, Homo sapiens
  Table A; Target 96089; HLA-A*02:03; TUBA3C; ENSG00000198033; TAA
TVVPGGDLAKV

SEQ ID NO: 96090 - protein, 11 aa, Homo sapiens
  Table A; Target 96090; HLA-A*02:04; TUBA3C; ENSG00000198033; TAA
TVVPGGDLAKV

SEQ ID NO: 96091 - protein, 11 aa, Homo sapiens
  Table A; Target 96091; HLA-A*02:07; TUBA3C; ENSG00000198033; TAA
TVVPGGDLAKV

SEQ ID NO: 96092 - protein, 11 aa, Homo sapiens
  Table A; Target 96092; HLA-A*25:01; TUBA3C; ENSG00000198033; TAA
TVVPGGDLAKV

SEQ ID NO: 96093 - protein, 11 aa, Homo sapiens
  Table A; Target 96093; HLA-A*26:01; TUBA3C; ENSG00000198033; TAA
TVVPGGDLAKV

SEQ ID NO: 96094 - protein, 11 aa, Homo sapiens
  Table A; Target 96094; HLA-A*68:01; TUBA3C; ENSG00000198033; TAA
TVVPGGDLAKV

SEQ ID NO: 96095 - protein, 11 aa, Homo sapiens
  Table A; Target 96095; HLA-A*68:02; TUBA3C; ENSG00000198033; TAA
TVVPGGDLAKV

SEQ ID NO: 96096 - protein, 11 aa, Homo sapiens
  Table A; Target 96096; HLA-B*58:01; TUBA3C; ENSG00000198033; TAA
TVVPGGDLAKV

SEQ ID NO: 96097 - protein, 11 aa, Homo sapiens
  Table A; Target 96097; HLA-C*06:02; TUBA3C; ENSG00000198033; TAA
TVVPGGDLAKV

SEQ ID NO: 96098 - protein, 8 aa, Homo sapiens
  Table A; Target 96098; HLA-B*40:02; TUBA3C; ENSG00000198033; TAA
TYAPVISA

SEQ ID NO: 96099 - protein, 8 aa, Homo sapiens
  Table A; Target 96099; HLA-B*54:01; TUBA3C; ENSG00000198033; TAA
TYAPVISA

SEQ ID NO: 96100 - protein, 8 aa, Homo sapiens
  Table A; Target 96100; HLA-B*56:01; TUBA3C; ENSG00000198033; TAA
TYAPVISA

SEQ ID NO: 96101 - protein, 8 aa, Homo sapiens
  Table A; Target 96101; HLA-C*04:01; TUBA3C; ENSG00000198033; TAA
TYAPVISA

SEQ ID NO: 96102 - protein, 8 aa, Homo sapiens
  Table A; Target 96102; HLA-C*06:02; TUBA3C; ENSG00000198033; TAA
TYAPVISA

SEQ ID NO: 96103 - protein, 8 aa, Homo sapiens
  Table A; Target 96103; HLA-C*07:02; TUBA3C; ENSG00000198033; TAA
TYAPVISA

SEQ ID NO: 96104 - protein, 8 aa, Homo sapiens
  Table A; Target 96104; HLA-C*14:02; TUBA3C; ENSG00000198033; TAA
TYAPVISA

SEQ ID NO: 96105 - protein, 9 aa, Homo sapiens
  Table A; Target 96105; HLA-A*24:02; TUBA3C; ENSG00000198033; TAA
TYAPVISAE

SEQ ID NO: 96106 - protein, 9 aa, Homo sapiens
  Table A; Target 96106; HLA-A*31:01; TUBA3C; ENSG00000198033; TAA
TYAPVISAE

SEQ ID NO: 96107 - protein, 9 aa, Homo sapiens
  Table A; Target 96107; HLA-A*33:03; TUBA3C; ENSG00000198033; TAA
TYAPVISAE

SEQ ID NO: 96108 - protein, 9 aa, Homo sapiens
  Table A; Target 96108; HLA-B*27:05; TUBA3C; ENSG00000198033; TAA
TYAPVISAE

SEQ ID NO: 96109 - protein, 9 aa, Homo sapiens
  Table A; Target 96109; HLA-C*04:01; TUBA3C; ENSG00000198033; TAA
TYAPVISAE

SEQ ID NO: 96110 - protein, 9 aa, Homo sapiens
  Table A; Target 96110; HLA-C*06:02; TUBA3C; ENSG00000198033; TAA
TYAPVISAE

SEQ ID NO: 96111 - protein, 9 aa, Homo sapiens
  Table A; Target 96111; HLA-C*07:01; TUBA3C; ENSG00000198033; TAA
TYAPVISAE

SEQ ID NO: 96112 - protein, 9 aa, Homo sapiens
  Table A; Target 96112; HLA-C*07:02; TUBA3C; ENSG00000198033; TAA
TYAPVISAE

SEQ ID NO: 96113 - protein, 9 aa, Homo sapiens
  Table A; Target 96113; HLA-C*14:02; TUBA3C; ENSG00000198033; TAA
TYAPVISAE

SEQ ID NO: 96114 - protein, 10 aa, Homo sapiens
  Table A; Target 96114; HLA-A*03:02; TUBA3C; ENSG00000198033; TAA
TYAPVISAEK

SEQ ID NO: 96115 - protein, 10 aa, Homo sapiens
  Table A; Target 96115; HLA-A*11:01; TUBA3C; ENSG00000198033; TAA
TYAPVISAEK

SEQ ID NO: 96116 - protein, 10 aa, Homo sapiens
  Table A; Target 96116; HLA-A*23:01; TUBA3C; ENSG00000198033; TAA
TYAPVISAEK

SEQ ID NO: 96117 - protein, 10 aa, Homo sapiens
  Table A; Target 96117; HLA-A*24:02; TUBA3C; ENSG00000198033; TAA
TYAPVISAEK

SEQ ID NO: 96118 - protein, 10 aa, Homo sapiens
  Table A; Target 96118; HLA-A*29:02; TUBA3C; ENSG00000198033; TAA
TYAPVISAEK

SEQ ID NO: 96119 - protein, 10 aa, Homo sapiens
  Table A; Target 96119; HLA-A*30:02; TUBA3C; ENSG00000198033; TAA
TYAPVISAEK

SEQ ID NO: 96120 - protein, 10 aa, Homo sapiens
  Table A; Target 96120; HLA-A*31:01; TUBA3C; ENSG00000198033; TAA
TYAPVISAEK

SEQ ID NO: 96121 - protein, 10 aa, Homo sapiens
  Table A; Target 96121; HLA-A*33:01; TUBA3C; ENSG00000198033; TAA
TYAPVISAEK

SEQ ID NO: 96122 - protein, 10 aa, Homo sapiens
  Table A; Target 96122; HLA-A*33:03; TUBA3C; ENSG00000198033; TAA
TYAPVISAEK

SEQ ID NO: 96123 - protein, 10 aa, Homo sapiens
  Table A; Target 96123; HLA-A*68:01; TUBA3C; ENSG00000198033; TAA
TYAPVISAEK

SEQ ID NO: 96124 - protein, 10 aa, Homo sapiens
  Table A; Target 96124; HLA-A*68:02; TUBA3C; ENSG00000198033; TAA
TYAPVISAEK

SEQ ID NO: 96125 - protein, 10 aa, Homo sapiens
  Table A; Target 96125; HLA-B*07:02; TUBA3C; ENSG00000198033; TAA
TYAPVISAEK

SEQ ID NO: 96126 - protein, 10 aa, Homo sapiens
  Table A; Target 96126; HLA-B*27:02; TUBA3C; ENSG00000198033; TAA
TYAPVISAEK

SEQ ID NO: 96127 - protein, 10 aa, Homo sapiens
  Table A; Target 96127; HLA-B*27:05; TUBA3C; ENSG00000198033; TAA
TYAPVISAEK

SEQ ID NO: 96128 - protein, 10 aa, Homo sapiens
  Table A; Target 96128; HLA-B*35:01; TUBA3C; ENSG00000198033; TAA
TYAPVISAEK

SEQ ID NO: 96129 - protein, 10 aa, Homo sapiens
  Table A; Target 96129; HLA-B*35:03; TUBA3C; ENSG00000198033; TAA
TYAPVISAEK

SEQ ID NO: 96130 - protein, 10 aa, Homo sapiens
  Table A; Target 96130; HLA-B*38:01; TUBA3C; ENSG00000198033; TAA
TYAPVISAEK

SEQ ID NO: 96131 - protein, 10 aa, Homo sapiens
  Table A; Target 96131; HLA-B*57:01; TUBA3C; ENSG00000198033; TAA
TYAPVISAEK

SEQ ID NO: 96132 - protein, 10 aa, Homo sapiens
  Table A; Target 96132; HLA-C*01:02; TUBA3C; ENSG00000198033; TAA
TYAPVISAEK

SEQ ID NO: 96133 - protein, 10 aa, Homo sapiens
  Table A; Target 96133; HLA-C*04:01; TUBA3C; ENSG00000198033; TAA
TYAPVISAEK

SEQ ID NO: 96134 - protein, 10 aa, Homo sapiens
  Table A; Target 96134; HLA-C*06:02; TUBA3C; ENSG00000198033; TAA
TYAPVISAEK

SEQ ID NO: 96135 - protein, 10 aa, Homo sapiens
  Table A; Target 96135; HLA-C*07:01; TUBA3C; ENSG00000198033; TAA
TYAPVISAEK

SEQ ID NO: 96136 - protein, 10 aa, Homo sapiens
  Table A; Target 96136; HLA-C*07:02; TUBA3C; ENSG00000198033; TAA
TYAPVISAEK

SEQ ID NO: 96137 - protein, 10 aa, Homo sapiens
  Table A; Target 96137; HLA-C*07:06; TUBA3C; ENSG00000198033; TAA
TYAPVISAEK

SEQ ID NO: 96138 - protein, 10 aa, Homo sapiens
  Table A; Target 96138; HLA-C*14:02; TUBA3C; ENSG00000198033; TAA
TYAPVISAEK

SEQ ID NO: 96139 - protein, 10 aa, Homo sapiens
  Table A; Target 96139; HLA-C*16:02; TUBA3C; ENSG00000198033; TAA
TYAPVISAEK

SEQ ID NO: 96140 - protein, 10 aa, Homo sapiens
  Table A; Target 96140; HLA-C*16:04; TUBA3C; ENSG00000198033; TAA
TYAPVISAEK

SEQ ID NO: 96141 - protein, 11 aa, Homo sapiens
  Table A; Target 96141; HLA-A*24:02; TUBA3C; ENSG00000198033; TAA
TYAPVISAEKA

SEQ ID NO: 96142 - protein, 11 aa, Homo sapiens
  Table A; Target 96142; HLA-C*04:01; TUBA3C; ENSG00000198033; TAA
TYAPVISAEKA

SEQ ID NO: 96143 - protein, 11 aa, Homo sapiens
  Table A; Target 96143; HLA-C*06:02; TUBA3C; ENSG00000198033; TAA
TYAPVISAEKA

SEQ ID NO: 96144 - protein, 8 aa, Homo sapiens
  Table A; Target 96144; HLA-A*23:01; TUBA3C; ENSG00000198033; TAA
TYTNLNRL

SEQ ID NO: 96145 - protein, 8 aa, Homo sapiens
  Table A; Target 96145; HLA-A*24:02; TUBA3C; ENSG00000198033; TAA
TYTNLNRL

SEQ ID NO: 96146 - protein, 8 aa, Homo sapiens
  Table A; Target 96146; HLA-C*07:02; TUBA3C; ENSG00000198033; TAA
TYTNLNRL

SEQ ID NO: 96147 - protein, 8 aa, Homo sapiens
  Table A; Target 96147; HLA-C*14:02; TUBA3C; ENSG00000198033; TAA
TYTNLNRL

SEQ ID NO: 96148 - protein, 8 aa, Homo sapiens
  Table A; Target 96148; HLA-C*16:01; TUBA3C; ENSG00000198033; TAA
TYTNLNRL

SEQ ID NO: 96149 - protein, 8 aa, Homo sapiens
  Table A; Target 96149; HLA-C*16:02; TUBA3C; ENSG00000198033; TAA
TYTNLNRL

SEQ ID NO: 96150 - protein, 9 aa, Homo sapiens
  Table A; Target 96150; HLA-A*23:01; TUBA3C; ENSG00000198033; TAA
TYTNLNRLI

SEQ ID NO: 96151 - protein, 9 aa, Homo sapiens
  Table A; Target 96151; HLA-A*24:02; TUBA3C; ENSG00000198033; TAA
TYTNLNRLI

SEQ ID NO: 96152 - protein, 9 aa, Homo sapiens
  Table A; Target 96152; HLA-B*07:02; TUBA3C; ENSG00000198033; TAA
TYTNLNRLI

SEQ ID NO: 96153 - protein, 9 aa, Homo sapiens
  Table A; Target 96153; HLA-C*06:02; TUBA3C; ENSG00000198033; TAA
TYTNLNRLI

SEQ ID NO: 96154 - protein, 9 aa, Homo sapiens
  Table A; Target 96154; HLA-C*07:01; TUBA3C; ENSG00000198033; TAA
TYTNLNRLI

SEQ ID NO: 96155 - protein, 9 aa, Homo sapiens
  Table A; Target 96155; HLA-C*16:01; TUBA3C; ENSG00000198033; TAA
TYTNLNRLI

SEQ ID NO: 96156 - protein, 9 aa, Homo sapiens
  Table A; Target 96156; HLA-C*16:02; TUBA3C; ENSG00000198033; TAA
TYTNLNRLI

SEQ ID NO: 96157 - protein, 9 aa, Homo sapiens
  Table A; Target 96157; HLA-A*23:01; TUBA3C; ENSG00000198033; TAA
VAEITNACF

SEQ ID NO: 96158 - protein, 9 aa, Homo sapiens
  Table A; Target 96158; HLA-A*24:02; TUBA3C; ENSG00000198033; TAA
VAEITNACF

SEQ ID NO: 96159 - protein, 9 aa, Homo sapiens
  Table A; Target 96159; HLA-A*32:01; TUBA3C; ENSG00000198033; TAA
VAEITNACF

SEQ ID NO: 96160 - protein, 9 aa, Homo sapiens
  Table A; Target 96160; HLA-B*15:01; TUBA3C; ENSG00000198033; TAA
VAEITNACF

SEQ ID NO: 96161 - protein, 9 aa, Homo sapiens
  Table A; Target 96161; HLA-B*15:03; TUBA3C; ENSG00000198033; TAA
VAEITNACF

SEQ ID NO: 96162 - protein, 9 aa, Homo sapiens
  Table A; Target 96162; HLA-B*27:02; TUBA3C; ENSG00000198033; TAA
VAEITNACF

SEQ ID NO: 96163 - protein, 9 aa, Homo sapiens
  Table A; Target 96163; HLA-B*27:05; TUBA3C; ENSG00000198033; TAA
VAEITNACF

SEQ ID NO: 96164 - protein, 9 aa, Homo sapiens
  Table A; Target 96164; HLA-B*35:01; TUBA3C; ENSG00000198033; TAA
VAEITNACF

SEQ ID NO: 96165 - protein, 9 aa, Homo sapiens
  Table A; Target 96165; HLA-B*35:03; TUBA3C; ENSG00000198033; TAA
VAEITNACF

SEQ ID NO: 96166 - protein, 9 aa, Homo sapiens
  Table A; Target 96166; HLA-B*38:01; TUBA3C; ENSG00000198033; TAA
VAEITNACF

SEQ ID NO: 96167 - protein, 9 aa, Homo sapiens
  Table A; Target 96167; HLA-B*39:01; TUBA3C; ENSG00000198033; TAA
VAEITNACF

SEQ ID NO: 96168 - protein, 9 aa, Homo sapiens
  Table A; Target 96168; HLA-B*46:01; TUBA3C; ENSG00000198033; TAA
VAEITNACF

SEQ ID NO: 96169 - protein, 9 aa, Homo sapiens
  Table A; Target 96169; HLA-B*55:01; TUBA3C; ENSG00000198033; TAA
VAEITNACF

SEQ ID NO: 96170 - protein, 9 aa, Homo sapiens
  Table A; Target 96170; HLA-B*57:01; TUBA3C; ENSG00000198033; TAA
VAEITNACF

SEQ ID NO: 96171 - protein, 9 aa, Homo sapiens
  Table A; Target 96171; HLA-B*58:01; TUBA3C; ENSG00000198033; TAA
VAEITNACF

SEQ ID NO: 96172 - protein, 9 aa, Homo sapiens
  Table A; Target 96172; HLA-C*01:02; TUBA3C; ENSG00000198033; TAA
VAEITNACF

SEQ ID NO: 96173 - protein, 9 aa, Homo sapiens
  Table A; Target 96173; HLA-C*03:03; TUBA3C; ENSG00000198033; TAA
VAEITNACF

SEQ ID NO: 96174 - protein, 9 aa, Homo sapiens
  Table A; Target 96174; HLA-C*03:04; TUBA3C; ENSG00000198033; TAA
VAEITNACF

SEQ ID NO: 96175 - protein, 9 aa, Homo sapiens
  Table A; Target 96175; HLA-C*04:01; TUBA3C; ENSG00000198033; TAA
VAEITNACF

SEQ ID NO: 96176 - protein, 9 aa, Homo sapiens
  Table A; Target 96176; HLA-C*05:01; TUBA3C; ENSG00000198033; TAA
VAEITNACF

SEQ ID NO: 96177 - protein, 9 aa, Homo sapiens
  Table A; Target 96177; HLA-C*06:02; TUBA3C; ENSG00000198033; TAA
VAEITNACF

SEQ ID NO: 96178 - protein, 9 aa, Homo sapiens
  Table A; Target 96178; HLA-C*07:01; TUBA3C; ENSG00000198033; TAA
VAEITNACF

SEQ ID NO: 96179 - protein, 9 aa, Homo sapiens
  Table A; Target 96179; HLA-C*07:02; TUBA3C; ENSG00000198033; TAA
VAEITNACF

SEQ ID NO: 96180 - protein, 9 aa, Homo sapiens
  Table A; Target 96180; HLA-C*07:04; TUBA3C; ENSG00000198033; TAA
VAEITNACF

SEQ ID NO: 96181 - protein, 9 aa, Homo sapiens
  Table A; Target 96181; HLA-C*14:02; TUBA3C; ENSG00000198033; TAA
VAEITNACF

SEQ ID NO: 96182 - protein, 9 aa, Homo sapiens
  Table A; Target 96182; HLA-C*16:01; TUBA3C; ENSG00000198033; TAA
VAEITNACF

SEQ ID NO: 96183 - protein, 9 aa, Homo sapiens
  Table A; Target 96183; HLA-C*16:02; TUBA3C; ENSG00000198033; TAA
VAEITNACF

SEQ ID NO: 96184 - protein, 9 aa, Homo sapiens
  Table A; Target 96184; HLA-C*16:04; TUBA3C; ENSG00000198033; TAA
VAEITNACF

SEQ ID NO: 96185 - protein, 10 aa, Homo sapiens
  Table A; Target 96185; HLA-C*07:01; TUBA3C; ENSG00000198033; TAA
VAEITNACFE

SEQ ID NO: 96186 - protein, 9 aa, Homo sapiens
  Table A; Target 96186; HLA-B*54:01; TUBA3C; ENSG00000198033; TAA
VCMLSNTTA

SEQ ID NO: 96187 - protein, 10 aa, Homo sapiens
  Table A; Target 96187; HLA-B*07:02; TUBA3C; ENSG00000198033; TAA
VCMLSNTTAI

SEQ ID NO: 96188 - protein, 10 aa, Homo sapiens
  Table A; Target 96188; HLA-C*07:01; TUBA3C; ENSG00000198033; TAA
VCMLSNTTAI

SEQ ID NO: 96189 - protein, 10 aa, Homo sapiens
  Table A; Target 96189; HLA-C*07:02; TUBA3C; ENSG00000198033; TAA
VCMLSNTTAI

SEQ ID NO: 96190 - protein, 9 aa, Homo sapiens
  Table A; Target 96190; HLA-A*01:01; TUBA3C; ENSG00000198033; TAA
VDEVRTGTY

SEQ ID NO: 96191 - protein, 9 aa, Homo sapiens
  Table A; Target 96191; HLA-A*30:02; TUBA3C; ENSG00000198033; TAA
VDEVRTGTY

SEQ ID NO: 96192 - protein, 9 aa, Homo sapiens
  Table A; Target 96192; HLA-A*32:01; TUBA3C; ENSG00000198033; TAA
VDEVRTGTY

SEQ ID NO: 96193 - protein, 9 aa, Homo sapiens
  Table A; Target 96193; HLA-B*15:01; TUBA3C; ENSG00000198033; TAA
VDEVRTGTY

SEQ ID NO: 96194 - protein, 9 aa, Homo sapiens
  Table A; Target 96194; HLA-B*15:03; TUBA3C; ENSG00000198033; TAA
VDEVRTGTY

SEQ ID NO: 96195 - protein, 9 aa, Homo sapiens
  Table A; Target 96195; HLA-B*18:01; TUBA3C; ENSG00000198033; TAA
VDEVRTGTY

SEQ ID NO: 96196 - protein, 9 aa, Homo sapiens
  Table A; Target 96196; HLA-B*27:02; TUBA3C; ENSG00000198033; TAA
VDEVRTGTY

SEQ ID NO: 96197 - protein, 9 aa, Homo sapiens
  Table A; Target 96197; HLA-B*37:01; TUBA3C; ENSG00000198033; TAA
VDEVRTGTY

SEQ ID NO: 96198 - protein, 9 aa, Homo sapiens
  Table A; Target 96198; HLA-B*44:02; TUBA3C; ENSG00000198033; TAA
VDEVRTGTY

SEQ ID NO: 96199 - protein, 9 aa, Homo sapiens
  Table A; Target 96199; HLA-B*44:03; TUBA3C; ENSG00000198033; TAA
VDEVRTGTY

SEQ ID NO: 96200 - protein, 9 aa, Homo sapiens
  Table A; Target 96200; HLA-B*46:01; TUBA3C; ENSG00000198033; TAA
VDEVRTGTY

SEQ ID NO: 96201 - protein, 9 aa, Homo sapiens
  Table A; Target 96201; HLA-C*04:01; TUBA3C; ENSG00000198033; TAA
VDEVRTGTY

SEQ ID NO: 96202 - protein, 9 aa, Homo sapiens
  Table A; Target 96202; HLA-C*06:02; TUBA3C; ENSG00000198033; TAA
VDEVRTGTY

SEQ ID NO: 96203 - protein, 9 aa, Homo sapiens
  Table A; Target 96203; HLA-C*07:01; TUBA3C; ENSG00000198033; TAA
VDEVRTGTY

SEQ ID NO: 96204 - protein, 9 aa, Homo sapiens
  Table A; Target 96204; HLA-C*07:02; TUBA3C; ENSG00000198033; TAA
VDEVRTGTY

SEQ ID NO: 96205 - protein, 9 aa, Homo sapiens
  Table A; Target 96205; HLA-C*07:04; TUBA3C; ENSG00000198033; TAA
VDEVRTGTY

SEQ ID NO: 96206 - protein, 9 aa, Homo sapiens
  Table A; Target 96206; HLA-C*12:03; TUBA3C; ENSG00000198033; TAA
VDEVRTGTY

SEQ ID NO: 96207 - protein, 9 aa, Homo sapiens
  Table A; Target 96207; HLA-C*16:01; TUBA3C; ENSG00000198033; TAA
VDEVRTGTY

SEQ ID NO: 96208 - protein, 9 aa, Homo sapiens
  Table A; Target 96208; HLA-C*16:02; TUBA3C; ENSG00000198033; TAA
VDEVRTGTY

SEQ ID NO: 96209 - protein, 9 aa, Homo sapiens
  Table A; Target 96209; HLA-C*16:04; TUBA3C; ENSG00000198033; TAA
VDEVRTGTY

SEQ ID NO: 96210 - protein, 10 aa, Homo sapiens
  Table A; Target 96210; HLA-A*31:01; TUBA3C; ENSG00000198033; TAA
VDEVRTGTYR

SEQ ID NO: 96211 - protein, 10 aa, Homo sapiens
  Table A; Target 96211; HLA-A*33:01; TUBA3C; ENSG00000198033; TAA
VDEVRTGTYR

SEQ ID NO: 96212 - protein, 10 aa, Homo sapiens
  Table A; Target 96212; HLA-C*04:01; TUBA3C; ENSG00000198033; TAA
VDEVRTGTYR

SEQ ID NO: 96213 - protein, 10 aa, Homo sapiens
  Table A; Target 96213; HLA-C*06:02; TUBA3C; ENSG00000198033; TAA
VDEVRTGTYR

SEQ ID NO: 96214 - protein, 8 aa, Homo sapiens
  Table A; Target 96214; HLA-A*30:01; TUBA3C; ENSG00000198033; TAA
VDLEPTVV

SEQ ID NO: 96215 - protein, 8 aa, Homo sapiens
  Table A; Target 96215; HLA-B*18:01; TUBA3C; ENSG00000198033; TAA
VDLEPTVV

SEQ ID NO: 96216 - protein, 8 aa, Homo sapiens
  Table A; Target 96216; HLA-B*37:01; TUBA3C; ENSG00000198033; TAA
VDLEPTVV

SEQ ID NO: 96217 - protein, 8 aa, Homo sapiens
  Table A; Target 96217; HLA-B*40:02; TUBA3C; ENSG00000198033; TAA
VDLEPTVV

SEQ ID NO: 96218 - protein, 8 aa, Homo sapiens
  Table A; Target 96218; HLA-B*49:01; TUBA3C; ENSG00000198033; TAA
VDLEPTVV

SEQ ID NO: 96219 - protein, 8 aa, Homo sapiens
  Table A; Target 96219; HLA-B*51:01; TUBA3C; ENSG00000198033; TAA
VDLEPTVV

SEQ ID NO: 96220 - protein, 8 aa, Homo sapiens
  Table A; Target 96220; HLA-C*04:01; TUBA3C; ENSG00000198033; TAA
VDLEPTVV

SEQ ID NO: 96221 - protein, 8 aa, Homo sapiens
  Table A; Target 96221; HLA-C*06:02; TUBA3C; ENSG00000198033; TAA
VDLEPTVV

SEQ ID NO: 96222 - protein, 8 aa, Homo sapiens
  Table A; Target 96222; HLA-C*07:01; TUBA3C; ENSG00000198033; TAA
VDLEPTVV

SEQ ID NO: 96223 - protein, 8 aa, Homo sapiens
  Table A; Target 96223; HLA-C*12:03; TUBA3C; ENSG00000198033; TAA
VDLEPTVV

SEQ ID NO: 96224 - protein, 11 aa, Homo sapiens
  Table A; Target 96224; HLA-A*02:01; TUBA3C; ENSG00000198033; TAA
VDLEPTVVDEV

SEQ ID NO: 96225 - protein, 11 aa, Homo sapiens
  Table A; Target 96225; HLA-A*30:01; TUBA3C; ENSG00000198033; TAA
VDLEPTVVDEV

SEQ ID NO: 96226 - protein, 9 aa, Homo sapiens
  Table A; Target 96226; HLA-C*07:01; TUBA3C; ENSG00000198033; TAA
VDLTEFQTN

SEQ ID NO: 96227 - protein, 10 aa, Homo sapiens
  Table A; Target 96227; HLA-A*30:01; TUBA3C; ENSG00000198033; TAA
VDLTEFQTNL

SEQ ID NO: 96228 - protein, 10 aa, Homo sapiens
  Table A; Target 96228; HLA-B*39:01; TUBA3C; ENSG00000198033; TAA
VDLTEFQTNL

SEQ ID NO: 96229 - protein, 10 aa, Homo sapiens
  Table A; Target 96229; HLA-B*40:02; TUBA3C; ENSG00000198033; TAA
VDLTEFQTNL

SEQ ID NO: 96230 - protein, 8 aa, Homo sapiens
  Table A; Target 96230; HLA-B*40:02; TUBA3C; ENSG00000198033; TAA
VDLVLDRI

SEQ ID NO: 96231 - protein, 9 aa, Homo sapiens
  Table A; Target 96231; HLA-A*30:01; TUBA3C; ENSG00000198033; TAA
VDNEAIYDI

SEQ ID NO: 96232 - protein, 9 aa, Homo sapiens
  Table A; Target 96232; HLA-B*13:02; TUBA3C; ENSG00000198033; TAA
VDNEAIYDI

SEQ ID NO: 96233 - protein, 9 aa, Homo sapiens
  Table A; Target 96233; HLA-B*27:02; TUBA3C; ENSG00000198033; TAA
VDNEAIYDI

SEQ ID NO: 96234 - protein, 9 aa, Homo sapiens
  Table A; Target 96234; HLA-B*37:01; TUBA3C; ENSG00000198033; TAA
VDNEAIYDI

SEQ ID NO: 96235 - protein, 9 aa, Homo sapiens
  Table A; Target 96235; HLA-B*38:01; TUBA3C; ENSG00000198033; TAA
VDNEAIYDI

SEQ ID NO: 96236 - protein, 9 aa, Homo sapiens
  Table A; Target 96236; HLA-B*40:02; TUBA3C; ENSG00000198033; TAA
VDNEAIYDI

SEQ ID NO: 96237 - protein, 9 aa, Homo sapiens
  Table A; Target 96237; HLA-B*44:02; TUBA3C; ENSG00000198033; TAA
VDNEAIYDI

SEQ ID NO: 96238 - protein, 9 aa, Homo sapiens
  Table A; Target 96238; HLA-C*06:02; TUBA3C; ENSG00000198033; TAA
VDNEAIYDI

SEQ ID NO: 96239 - protein, 9 aa, Homo sapiens
  Table A; Target 96239; HLA-C*07:01; TUBA3C; ENSG00000198033; TAA
VDNEAIYDI

SEQ ID NO: 96240 - protein, 9 aa, Homo sapiens
  Table A; Target 96240; HLA-C*07:04; TUBA3C; ENSG00000198033; TAA
VDNEAIYDI

SEQ ID NO: 96241 - protein, 9 aa, Homo sapiens
  Table A; Target 96241; HLA-C*12:03; TUBA3C; ENSG00000198033; TAA
VDNEAIYDI

SEQ ID NO: 96242 - protein, 11 aa, Homo sapiens
  Table A; Target 96242; HLA-A*31:01; TUBA3C; ENSG00000198033; TAA
VDNEAIYDICR

SEQ ID NO: 96243 - protein, 11 aa, Homo sapiens
  Table A; Target 96243; HLA-A*33:03; TUBA3C; ENSG00000198033; TAA
VDNEAIYDICR

SEQ ID NO: 96244 - protein, 11 aa, Homo sapiens
  Table A; Target 96244; HLA-B*27:02; TUBA3C; ENSG00000198033; TAA
VDNEAIYDICR

SEQ ID NO: 96245 - protein, 11 aa, Homo sapiens
  Table A; Target 96245; HLA-C*04:01; TUBA3C; ENSG00000198033; TAA
VDNEAIYDICR

SEQ ID NO: 96246 - protein, 8 aa, Homo sapiens
  Table A; Target 96246; HLA-A*30:01; TUBA3C; ENSG00000198033; TAA
VDWCPTGF

SEQ ID NO: 96247 - protein, 8 aa, Homo sapiens
  Table A; Target 96247; HLA-B*37:01; TUBA3C; ENSG00000198033; TAA
VDWCPTGF

SEQ ID NO: 96248 - protein, 8 aa, Homo sapiens
  Table A; Target 96248; HLA-C*04:01; TUBA3C; ENSG00000198033; TAA
VDWCPTGF

SEQ ID NO: 96249 - protein, 8 aa, Homo sapiens
  Table A; Target 96249; HLA-C*07:01; TUBA3C; ENSG00000198033; TAA
VDWCPTGF

SEQ ID NO: 96250 - protein, 9 aa, Homo sapiens
  Table A; Target 96250; HLA-A*03:01; TUBA3C; ENSG00000198033; TAA
VDWCPTGFK

SEQ ID NO: 96251 - protein, 8 aa, Homo sapiens
  Table A; Target 96251; HLA-B*27:05; TUBA3C; ENSG00000198033; TAA
VDYGKKSK

SEQ ID NO: 96252 - protein, 8 aa, Homo sapiens
  Table A; Target 96252; HLA-B*37:01; TUBA3C; ENSG00000198033; TAA
VDYGKKSK

SEQ ID NO: 96253 - protein, 8 aa, Homo sapiens
  Table A; Target 96253; HLA-B*40:02; TUBA3C; ENSG00000198033; TAA
VDYGKKSK

SEQ ID NO: 96254 - protein, 8 aa, Homo sapiens
  Table A; Target 96254; HLA-C*04:01; TUBA3C; ENSG00000198033; TAA
VDYGKKSK

SEQ ID NO: 96255 - protein, 8 aa, Homo sapiens
  Table A; Target 96255; HLA-C*06:02; TUBA3C; ENSG00000198033; TAA
VDYGKKSK

SEQ ID NO: 96256 - protein, 8 aa, Homo sapiens
  Table A; Target 96256; HLA-C*07:01; TUBA3C; ENSG00000198033; TAA
VDYGKKSK

SEQ ID NO: 96257 - protein, 8 aa, Homo sapiens
  Table A; Target 96257; HLA-C*07:02; TUBA3C; ENSG00000198033; TAA
VDYGKKSK

SEQ ID NO: 96258 - protein, 8 aa, Homo sapiens
  Table A; Target 96258; HLA-C*16:01; TUBA3C; ENSG00000198033; TAA
VDYGKKSK

SEQ ID NO: 96259 - protein, 9 aa, Homo sapiens
  Table A; Target 96259; HLA-A*03:01; TUBA3C; ENSG00000198033; TAA
VDYGKKSKL

SEQ ID NO: 96260 - protein, 9 aa, Homo sapiens
  Table A; Target 96260; HLA-B*08:01; TUBA3C; ENSG00000198033; TAA
VDYGKKSKL

SEQ ID NO: 96261 - protein, 9 aa, Homo sapiens
  Table A; Target 96261; HLA-B*37:01; TUBA3C; ENSG00000198033; TAA
VDYGKKSKL

SEQ ID NO: 96262 - protein, 9 aa, Homo sapiens
  Table A; Target 96262; HLA-B*40:02; TUBA3C; ENSG00000198033; TAA
VDYGKKSKL

SEQ ID NO: 96263 - protein, 9 aa, Homo sapiens
  Table A; Target 96263; HLA-C*04:01; TUBA3C; ENSG00000198033; TAA
VDYGKKSKL

SEQ ID NO: 96264 - protein, 9 aa, Homo sapiens
  Table A; Target 96264; HLA-C*06:02; TUBA3C; ENSG00000198033; TAA
VDYGKKSKL

SEQ ID NO: 96265 - protein, 11 aa, Homo sapiens
  Table A; Target 96265; HLA-A*01:01; TUBA3C; ENSG00000198033; TAA
VEAEAEEGEEY

SEQ ID NO: 96266 - protein, 11 aa, Homo sapiens
  Table A; Target 96266; HLA-A*25:01; TUBA3C; ENSG00000198033; TAA
VEAEAEEGEEY

SEQ ID NO: 96267 - protein, 11 aa, Homo sapiens
  Table A; Target 96267; HLA-A*26:01; TUBA3C; ENSG00000198033; TAA
VEAEAEEGEEY

SEQ ID NO: 96268 - protein, 11 aa, Homo sapiens
  Table A; Target 96268; HLA-A*29:02; TUBA3C; ENSG00000198033; TAA
VEAEAEEGEEY

SEQ ID NO: 96269 - protein, 11 aa, Homo sapiens
  Table A; Target 96269; HLA-A*30:01; TUBA3C; ENSG00000198033; TAA
VEAEAEEGEEY

SEQ ID NO: 96270 - protein, 11 aa, Homo sapiens
  Table A; Target 96270; HLA-A*30:02; TUBA3C; ENSG00000198033; TAA
VEAEAEEGEEY

SEQ ID NO: 96271 - protein, 11 aa, Homo sapiens
  Table A; Target 96271; HLA-A*32:01; TUBA3C; ENSG00000198033; TAA
VEAEAEEGEEY

SEQ ID NO: 96272 - protein, 11 aa, Homo sapiens
  Table A; Target 96272; HLA-B*15:01; TUBA3C; ENSG00000198033; TAA
VEAEAEEGEEY

SEQ ID NO: 96273 - protein, 11 aa, Homo sapiens
  Table A; Target 96273; HLA-B*15:03; TUBA3C; ENSG00000198033; TAA
VEAEAEEGEEY

SEQ ID NO: 96274 - protein, 11 aa, Homo sapiens
  Table A; Target 96274; HLA-B*18:01; TUBA3C; ENSG00000198033; TAA
VEAEAEEGEEY

SEQ ID NO: 96275 - protein, 11 aa, Homo sapiens
  Table A; Target 96275; HLA-B*27:02; TUBA3C; ENSG00000198033; TAA
VEAEAEEGEEY

SEQ ID NO: 96276 - protein, 11 aa, Homo sapiens
  Table A; Target 96276; HLA-B*27:05; TUBA3C; ENSG00000198033; TAA
VEAEAEEGEEY

SEQ ID NO: 96277 - protein, 11 aa, Homo sapiens
  Table A; Target 96277; HLA-B*35:01; TUBA3C; ENSG00000198033; TAA
VEAEAEEGEEY

SEQ ID NO: 96278 - protein, 11 aa, Homo sapiens
  Table A; Target 96278; HLA-B*38:01; TUBA3C; ENSG00000198033; TAA
VEAEAEEGEEY

SEQ ID NO: 96279 - protein, 11 aa, Homo sapiens
  Table A; Target 96279; HLA-B*39:01; TUBA3C; ENSG00000198033; TAA
VEAEAEEGEEY

SEQ ID NO: 96280 - protein, 11 aa, Homo sapiens
  Table A; Target 96280; HLA-B*40:01; TUBA3C; ENSG00000198033; TAA
VEAEAEEGEEY

SEQ ID NO: 96281 - protein, 11 aa, Homo sapiens
  Table A; Target 96281; HLA-B*40:02; TUBA3C; ENSG00000198033; TAA
VEAEAEEGEEY

SEQ ID NO: 96282 - protein, 11 aa, Homo sapiens
  Table A; Target 96282; HLA-B*44:02; TUBA3C; ENSG00000198033; TAA
VEAEAEEGEEY

SEQ ID NO: 96283 - protein, 11 aa, Homo sapiens
  Table A; Target 96283; HLA-B*44:03; TUBA3C; ENSG00000198033; TAA
VEAEAEEGEEY

SEQ ID NO: 96284 - protein, 11 aa, Homo sapiens
  Table A; Target 96284; HLA-B*46:01; TUBA3C; ENSG00000198033; TAA
VEAEAEEGEEY

SEQ ID NO: 96285 - protein, 11 aa, Homo sapiens
  Table A; Target 96285; HLA-B*55:01; TUBA3C; ENSG00000198033; TAA
VEAEAEEGEEY

SEQ ID NO: 96286 - protein, 11 aa, Homo sapiens
  Table A; Target 96286; HLA-B*57:01; TUBA3C; ENSG00000198033; TAA
VEAEAEEGEEY

SEQ ID NO: 96287 - protein, 11 aa, Homo sapiens
  Table A; Target 96287; HLA-B*58:01; TUBA3C; ENSG00000198033; TAA
VEAEAEEGEEY

SEQ ID NO: 96288 - protein, 11 aa, Homo sapiens
  Table A; Target 96288; HLA-C*01:02; TUBA3C; ENSG00000198033; TAA
VEAEAEEGEEY

SEQ ID NO: 96289 - protein, 11 aa, Homo sapiens
  Table A; Target 96289; HLA-C*02:02; TUBA3C; ENSG00000198033; TAA
VEAEAEEGEEY

SEQ ID NO: 96290 - protein, 11 aa, Homo sapiens
  Table A; Target 96290; HLA-C*03:03; TUBA3C; ENSG00000198033; TAA
VEAEAEEGEEY

SEQ ID NO: 96291 - protein, 11 aa, Homo sapiens
  Table A; Target 96291; HLA-C*04:01; TUBA3C; ENSG00000198033; TAA
VEAEAEEGEEY

SEQ ID NO: 96292 - protein, 11 aa, Homo sapiens
  Table A; Target 96292; HLA-C*07:01; TUBA3C; ENSG00000198033; TAA
VEAEAEEGEEY

SEQ ID NO: 96293 - protein, 11 aa, Homo sapiens
  Table A; Target 96293; HLA-C*07:04; TUBA3C; ENSG00000198033; TAA
VEAEAEEGEEY

SEQ ID NO: 96294 - protein, 11 aa, Homo sapiens
  Table A; Target 96294; HLA-C*12:03; TUBA3C; ENSG00000198033; TAA
VEAEAEEGEEY

SEQ ID NO: 96295 - protein, 11 aa, Homo sapiens
  Table A; Target 96295; HLA-C*14:02; TUBA3C; ENSG00000198033; TAA
VEAEAEEGEEY

SEQ ID NO: 96296 - protein, 11 aa, Homo sapiens
  Table A; Target 96296; HLA-C*16:02; TUBA3C; ENSG00000198033; TAA
VEAEAEEGEEY

SEQ ID NO: 96297 - protein, 11 aa, Homo sapiens
  Table A; Target 96297; HLA-C*16:04; TUBA3C; ENSG00000198033; TAA
VEAEAEEGEEY

SEQ ID NO: 96298 - protein, 8 aa, Homo sapiens
  Table A; Target 96298; HLA-B*40:01; TUBA3C; ENSG00000198033; TAA
VEPYNSIL

SEQ ID NO: 96299 - protein, 8 aa, Homo sapiens
  Table A; Target 96299; HLA-B*49:01; TUBA3C; ENSG00000198033; TAA
VEPYNSIL

SEQ ID NO: 96300 - protein, 8 aa, Homo sapiens
  Table A; Target 96300; HLA-C*04:01; TUBA3C; ENSG00000198033; TAA
VEPYNSIL

SEQ ID NO: 96301 - protein, 8 aa, Homo sapiens
  Table A; Target 96301; HLA-C*07:01; TUBA3C; ENSG00000198033; TAA
VEPYNSIL

SEQ ID NO: 96302 - protein, 9 aa, Homo sapiens
  Table A; Target 96302; HLA-B*49:01; TUBA3C; ENSG00000198033; TAA
VEPYNSILT

SEQ ID NO: 96303 - protein, 9 aa, Homo sapiens
  Table A; Target 96303; HLA-C*04:01; TUBA3C; ENSG00000198033; TAA
VEPYNSILT

SEQ ID NO: 96304 - protein, 9 aa, Homo sapiens
  Table A; Target 96304; HLA-C*07:01; TUBA3C; ENSG00000198033; TAA
VEPYNSILT

SEQ ID NO: 96305 - protein, 10 aa, Homo sapiens
  Table A; Target 96305; HLA-C*04:01; TUBA3C; ENSG00000198033; TAA
VEPYNSILTT

SEQ ID NO: 96306 - protein, 10 aa, Homo sapiens
  Table A; Target 96306; HLA-C*07:01; TUBA3C; ENSG00000198033; TAA
VEPYNSILTT

SEQ ID NO: 96307 - protein, 10 aa, Homo sapiens
  Table A; Target 96307; HLA-C*07:02; TUBA3C; ENSG00000198033; TAA
VEPYNSILTT

SEQ ID NO: 96308 - protein, 11 aa, Homo sapiens
  Table A; Target 96308; HLA-C*04:01; TUBA3C; ENSG00000198033; TAA
VEPYNSILTTH

SEQ ID NO: 96309 - protein, 11 aa, Homo sapiens
  Table A; Target 96309; HLA-C*07:01; TUBA3C; ENSG00000198033; TAA
VEPYNSILTTH

SEQ ID NO: 96310 - protein, 9 aa, Homo sapiens
  Table A; Target 96310; HLA-A*02:01; TUBA3C; ENSG00000198033; TAA
VFVDLEPTV

SEQ ID NO: 96311 - protein, 9 aa, Homo sapiens
  Table A; Target 96311; HLA-A*02:07; TUBA3C; ENSG00000198033; TAA
VFVDLEPTV

SEQ ID NO: 96312 - protein, 9 aa, Homo sapiens
  Table A; Target 96312; HLA-A*23:01; TUBA3C; ENSG00000198033; TAA
VFVDLEPTV

SEQ ID NO: 96313 - protein, 9 aa, Homo sapiens
  Table A; Target 96313; HLA-A*24:02; TUBA3C; ENSG00000198033; TAA
VFVDLEPTV

SEQ ID NO: 96314 - protein, 9 aa, Homo sapiens
  Table A; Target 96314; HLA-A*29:02; TUBA3C; ENSG00000198033; TAA
VFVDLEPTV

SEQ ID NO: 96315 - protein, 9 aa, Homo sapiens
  Table A; Target 96315; HLA-A*30:01; TUBA3C; ENSG00000198033; TAA
VFVDLEPTV

SEQ ID NO: 96316 - protein, 9 aa, Homo sapiens
  Table A; Target 96316; HLA-B*13:02; TUBA3C; ENSG00000198033; TAA
VFVDLEPTV

SEQ ID NO: 96317 - protein, 9 aa, Homo sapiens
  Table A; Target 96317; HLA-B*27:05; TUBA3C; ENSG00000198033; TAA
VFVDLEPTV

SEQ ID NO: 96318 - protein, 9 aa, Homo sapiens
  Table A; Target 96318; HLA-B*35:03; TUBA3C; ENSG00000198033; TAA
VFVDLEPTV

SEQ ID NO: 96319 - protein, 9 aa, Homo sapiens
  Table A; Target 96319; HLA-B*39:01; TUBA3C; ENSG00000198033; TAA
VFVDLEPTV

SEQ ID NO: 96320 - protein, 9 aa, Homo sapiens
  Table A; Target 96320; HLA-B*40:02; TUBA3C; ENSG00000198033; TAA
VFVDLEPTV

SEQ ID NO: 96321 - protein, 9 aa, Homo sapiens
  Table A; Target 96321; HLA-B*46:01; TUBA3C; ENSG00000198033; TAA
VFVDLEPTV

SEQ ID NO: 96322 - protein, 9 aa, Homo sapiens
  Table A; Target 96322; HLA-B*49:01; TUBA3C; ENSG00000198033; TAA
VFVDLEPTV

SEQ ID NO: 96323 - protein, 9 aa, Homo sapiens
  Table A; Target 96323; HLA-B*51:01; TUBA3C; ENSG00000198033; TAA
VFVDLEPTV

SEQ ID NO: 96324 - protein, 9 aa, Homo sapiens
  Table A; Target 96324; HLA-B*55:01; TUBA3C; ENSG00000198033; TAA
VFVDLEPTV

SEQ ID NO: 96325 - protein, 9 aa, Homo sapiens
  Table A; Target 96325; HLA-C*02:02; TUBA3C; ENSG00000198033; TAA
VFVDLEPTV

SEQ ID NO: 96326 - protein, 9 aa, Homo sapiens
  Table A; Target 96326; HLA-C*04:01; TUBA3C; ENSG00000198033; TAA
VFVDLEPTV

SEQ ID NO: 96327 - protein, 9 aa, Homo sapiens
  Table A; Target 96327; HLA-C*06:02; TUBA3C; ENSG00000198033; TAA
VFVDLEPTV

SEQ ID NO: 96328 - protein, 9 aa, Homo sapiens
  Table A; Target 96328; HLA-C*07:01; TUBA3C; ENSG00000198033; TAA
VFVDLEPTV

SEQ ID NO: 96329 - protein, 9 aa, Homo sapiens
  Table A; Target 96329; HLA-C*12:03; TUBA3C; ENSG00000198033; TAA
VFVDLEPTV

SEQ ID NO: 96330 - protein, 9 aa, Homo sapiens
  Table A; Target 96330; HLA-C*14:02; TUBA3C; ENSG00000198033; TAA
VFVDLEPTV

SEQ ID NO: 96331 - protein, 9 aa, Homo sapiens
  Table A; Target 96331; HLA-C*16:01; TUBA3C; ENSG00000198033; TAA
VFVDLEPTV

SEQ ID NO: 96332 - protein, 9 aa, Homo sapiens
  Table A; Target 96332; HLA-C*16:02; TUBA3C; ENSG00000198033; TAA
VFVDLEPTV

SEQ ID NO: 96333 - protein, 9 aa, Homo sapiens
  Table A; Target 96333; HLA-C*16:04; TUBA3C; ENSG00000198033; TAA
VFVDLEPTV

SEQ ID NO: 96334 - protein, 10 aa, Homo sapiens
  Table A; Target 96334; HLA-A*23:01; TUBA3C; ENSG00000198033; TAA
VFVDLEPTVV

SEQ ID NO: 96335 - protein, 10 aa, Homo sapiens
  Table A; Target 96335; HLA-A*30:01; TUBA3C; ENSG00000198033; TAA
VFVDLEPTVV

SEQ ID NO: 96336 - protein, 10 aa, Homo sapiens
  Table A; Target 96336; HLA-C*04:01; TUBA3C; ENSG00000198033; TAA
VFVDLEPTVV

SEQ ID NO: 96337 - protein, 10 aa, Homo sapiens
  Table A; Target 96337; HLA-C*12:03; TUBA3C; ENSG00000198033; TAA
VFVDLEPTVV

SEQ ID NO: 96338 - protein, 10 aa, Homo sapiens
  Table A; Target 96338; HLA-B*39:01; TUBA3C; ENSG00000198033; TAA
VGEGMEEGEF

SEQ ID NO: 96339 - protein, 10 aa, Homo sapiens
  Table A; Target 96339; HLA-C*04:01; TUBA3C; ENSG00000198033; TAA
VGEGMEEGEF

SEQ ID NO: 96340 - protein, 10 aa, Homo sapiens
  Table A; Target 96340; HLA-C*05:01; TUBA3C; ENSG00000198033; TAA
VGEGMEEGEF

SEQ ID NO: 96341 - protein, 10 aa, Homo sapiens
  Table A; Target 96341; HLA-C*07:01; TUBA3C; ENSG00000198033; TAA
VGEGMEEGEF

SEQ ID NO: 96342 - protein, 9 aa, Homo sapiens
  Table A; Target 96342; HLA-C*04:01; TUBA3C; ENSG00000198033; TAA
VGINYQPPT

SEQ ID NO: 96343 - protein, 9 aa, Homo sapiens
  Table A; Target 96343; HLA-C*06:02; TUBA3C; ENSG00000198033; TAA
VGINYQPPT

SEQ ID NO: 96344 - protein, 9 aa, Homo sapiens
  Table A; Target 96344; HLA-C*12:03; TUBA3C; ENSG00000198033; TAA
VGINYQPPT

SEQ ID NO: 96345 - protein, 9 aa, Homo sapiens
  Table A; Target 96345; HLA-C*16:01; TUBA3C; ENSG00000198033; TAA
VGINYQPPT

SEQ ID NO: 96346 - protein, 9 aa, Homo sapiens
  Table A; Target 96346; HLA-C*16:02; TUBA3C; ENSG00000198033; TAA
VGINYQPPT

SEQ ID NO: 96347 - protein, 10 aa, Homo sapiens
  Table A; Target 96347; HLA-A*02:01; TUBA3C; ENSG00000198033; TAA
VGINYQPPTV

SEQ ID NO: 96348 - protein, 10 aa, Homo sapiens
  Table A; Target 96348; HLA-B*51:01; TUBA3C; ENSG00000198033; TAA
VGINYQPPTV

SEQ ID NO: 96349 - protein, 10 aa, Homo sapiens
  Table A; Target 96349; HLA-C*04:01; TUBA3C; ENSG00000198033; TAA
VGINYQPPTV

SEQ ID NO: 96350 - protein, 10 aa, Homo sapiens
  Table A; Target 96350; HLA-C*06:02; TUBA3C; ENSG00000198033; TAA
VGINYQPPTV

SEQ ID NO: 96351 - protein, 10 aa, Homo sapiens
  Table A; Target 96351; HLA-C*12:03; TUBA3C; ENSG00000198033; TAA
VGINYQPPTV

SEQ ID NO: 96352 - protein, 10 aa, Homo sapiens
  Table A; Target 96352; HLA-C*16:02; TUBA3C; ENSG00000198033; TAA
VGINYQPPTV

SEQ ID NO: 96353 - protein, 8 aa, Homo sapiens
  Table A; Target 96353; HLA-C*04:01; TUBA3C; ENSG00000198033; TAA
VGQAGVQI

SEQ ID NO: 96354 - protein, 9 aa, Homo sapiens
  Table A; Target 96354; HLA-C*12:03; TUBA3C; ENSG00000198033; TAA
VGQAGVQIG

SEQ ID NO: 96355 - protein, 10 aa, Homo sapiens
  Table A; Target 96355; HLA-A*31:01; TUBA3C; ENSG00000198033; TAA
VGQAGVQIGN

SEQ ID NO: 96356 - protein, 10 aa, Homo sapiens
  Table A; Target 96356; HLA-C*04:01; TUBA3C; ENSG00000198033; TAA
VGQAGVQIGN

SEQ ID NO: 96357 - protein, 10 aa, Homo sapiens
  Table A; Target 96357; HLA-C*06:02; TUBA3C; ENSG00000198033; TAA
VGQAGVQIGN

SEQ ID NO: 96358 - protein, 10 aa, Homo sapiens
  Table A; Target 96358; HLA-C*07:01; TUBA3C; ENSG00000198033; TAA
VGQAGVQIGN

SEQ ID NO: 96359 - protein, 10 aa, Homo sapiens
  Table A; Target 96359; HLA-C*07:02; TUBA3C; ENSG00000198033; TAA
VGQAGVQIGN

SEQ ID NO: 96360 - protein, 10 aa, Homo sapiens
  Table A; Target 96360; HLA-C*12:03; TUBA3C; ENSG00000198033; TAA
VGQAGVQIGN

SEQ ID NO: 96361 - protein, 11 aa, Homo sapiens
  Table A; Target 96361; HLA-C*06:02; TUBA3C; ENSG00000198033; TAA
VGQAGVQIGNA

SEQ ID NO: 96362 - protein, 11 aa, Homo sapiens
  Table A; Target 96362; HLA-C*12:03; TUBA3C; ENSG00000198033; TAA
VGQAGVQIGNA

SEQ ID NO: 96363 - protein, 8 aa, Homo sapiens
  Table A; Target 96363; HLA-B*46:01; TUBA3C; ENSG00000198033; TAA
VGVDSVEA

SEQ ID NO: 96364 - protein, 9 aa, Homo sapiens
  Table A; Target 96364; HLA-B*38:01; TUBA3C; ENSG00000198033; TAA
VHWYVGEGM

SEQ ID NO: 96365 - protein, 8 aa, Homo sapiens
  Table A; Target 96365; HLA-A*32:01; TUBA3C; ENSG00000198033; TAA
VISAEKAY

SEQ ID NO: 96366 - protein, 8 aa, Homo sapiens
  Table A; Target 96366; HLA-B*15:01; TUBA3C; ENSG00000198033; TAA
VISAEKAY

SEQ ID NO: 96367 - protein, 8 aa, Homo sapiens
  Table A; Target 96367; HLA-B*39:01; TUBA3C; ENSG00000198033; TAA
VISAEKAY

SEQ ID NO: 96368 - protein, 8 aa, Homo sapiens
  Table A; Target 96368; HLA-C*07:04; TUBA3C; ENSG00000198033; TAA
VISAEKAY

SEQ ID NO: 96369 - protein, 8 aa, Homo sapiens
  Table A; Target 96369; HLA-C*16:01; TUBA3C; ENSG00000198033; TAA
VISAEKAY

SEQ ID NO: 96370 - protein, 8 aa, Homo sapiens
  Table A; Target 96370; HLA-C*16:02; TUBA3C; ENSG00000198033; TAA
VISAEKAY

SEQ ID NO: 96371 - protein, 9 aa, Homo sapiens
  Table A; Target 96371; HLA-A*03:02; TUBA3C; ENSG00000198033; TAA
VISAEKAYH

SEQ ID NO: 96372 - protein, 8 aa, Homo sapiens
  Table A; Target 96372; HLA-A*02:04; TUBA3C; ENSG00000198033; TAA
VLDRIRKL

SEQ ID NO: 96373 - protein, 8 aa, Homo sapiens
  Table A; Target 96373; HLA-A*02:07; TUBA3C; ENSG00000198033; TAA
VLDRIRKL

SEQ ID NO: 96374 - protein, 8 aa, Homo sapiens
  Table A; Target 96374; HLA-A*03:01; TUBA3C; ENSG00000198033; TAA
VLDRIRKL

SEQ ID NO: 96375 - protein, 8 aa, Homo sapiens
  Table A; Target 96375; HLA-B*08:01; TUBA3C; ENSG00000198033; TAA
VLDRIRKL

SEQ ID NO: 96376 - protein, 8 aa, Homo sapiens
  Table A; Target 96376; HLA-C*04:01; TUBA3C; ENSG00000198033; TAA
VLDRIRKL

SEQ ID NO: 96377 - protein, 8 aa, Homo sapiens
  Table A; Target 96377; HLA-A*23:01; TUBA3C; ENSG00000198033; TAA
VNAAIATI

SEQ ID NO: 96378 - protein, 8 aa, Homo sapiens
  Table A; Target 96378; HLA-B*51:01; TUBA3C; ENSG00000198033; TAA
VNAAIATI

SEQ ID NO: 96379 - protein, 8 aa, Homo sapiens
  Table A; Target 96379; HLA-C*04:01; TUBA3C; ENSG00000198033; TAA
VNAAIATI

SEQ ID NO: 96380 - protein, 8 aa, Homo sapiens
  Table A; Target 96380; HLA-C*06:02; TUBA3C; ENSG00000198033; TAA
VNAAIATI

SEQ ID NO: 96381 - protein, 9 aa, Homo sapiens
  Table A; Target 96381; HLA-A*03:01; TUBA3C; ENSG00000198033; TAA
VNAAIATIK

SEQ ID NO: 96382 - protein, 9 aa, Homo sapiens
  Table A; Target 96382; HLA-A*03:02; TUBA3C; ENSG00000198033; TAA
VNAAIATIK

SEQ ID NO: 96383 - protein, 9 aa, Homo sapiens
  Table A; Target 96383; HLA-A*11:01; TUBA3C; ENSG00000198033; TAA
VNAAIATIK

SEQ ID NO: 96384 - protein, 9 aa, Homo sapiens
  Table A; Target 96384; HLA-A*33:01; TUBA3C; ENSG00000198033; TAA
VNAAIATIK

SEQ ID NO: 96385 - protein, 9 aa, Homo sapiens
  Table A; Target 96385; HLA-A*33:03; TUBA3C; ENSG00000198033; TAA
VNAAIATIK

SEQ ID NO: 96386 - protein, 9 aa, Homo sapiens
  Table A; Target 96386; HLA-A*68:01; TUBA3C; ENSG00000198033; TAA
VNAAIATIK

SEQ ID NO: 96387 - protein, 9 aa, Homo sapiens
  Table A; Target 96387; HLA-B*27:02; TUBA3C; ENSG00000198033; TAA
VNAAIATIK

SEQ ID NO: 96388 - protein, 9 aa, Homo sapiens
  Table A; Target 96388; HLA-B*27:05; TUBA3C; ENSG00000198033; TAA
VNAAIATIK

SEQ ID NO: 96389 - protein, 9 aa, Homo sapiens
  Table A; Target 96389; HLA-C*04:01; TUBA3C; ENSG00000198033; TAA
VNAAIATIK

SEQ ID NO: 96390 - protein, 9 aa, Homo sapiens
  Table A; Target 96390; HLA-C*07:01; TUBA3C; ENSG00000198033; TAA
VNAAIATIK

SEQ ID NO: 96391 - protein, 9 aa, Homo sapiens
  Table A; Target 96391; HLA-C*07:06; TUBA3C; ENSG00000198033; TAA
VNAAIATIK

SEQ ID NO: 96392 - protein, 9 aa, Homo sapiens
  Table A; Target 96392; HLA-C*12:03; TUBA3C; ENSG00000198033; TAA
VNAAIATIK

SEQ ID NO: 96393 - protein, 10 aa, Homo sapiens
  Table A; Target 96393; HLA-C*07:01; TUBA3C; ENSG00000198033; TAA
VNAAIATIKT

SEQ ID NO: 96394 - protein, 10 aa, Homo sapiens
  Table A; Target 96394; HLA-C*07:02; TUBA3C; ENSG00000198033; TAA
VNAAIATIKT

SEQ ID NO: 96395 - protein, 11 aa, Homo sapiens
  Table A; Target 96395; HLA-A*03:02; TUBA3C; ENSG00000198033; TAA
VNAAIATIKTK

SEQ ID NO: 96396 - protein, 11 aa, Homo sapiens
  Table A; Target 96396; HLA-B*27:02; TUBA3C; ENSG00000198033; TAA
VNAAIATIKTK

SEQ ID NO: 96397 - protein, 11 aa, Homo sapiens
  Table A; Target 96397; HLA-C*04:01; TUBA3C; ENSG00000198033; TAA
VNAAIATIKTK

SEQ ID NO: 96398 - protein, 11 aa, Homo sapiens
  Table A; Target 96398; HLA-C*06:02; TUBA3C; ENSG00000198033; TAA
VNAAIATIKTK

SEQ ID NO: 96399 - protein, 11 aa, Homo sapiens
  Table A; Target 96399; HLA-C*07:01; TUBA3C; ENSG00000198033; TAA
VNAAIATIKTK

SEQ ID NO: 96400 - protein, 9 aa, Homo sapiens
  Table A; Target 96400; HLA-B*07:02; TUBA3C; ENSG00000198033; TAA
VPGGDLAKV

SEQ ID NO: 96401 - protein, 9 aa, Homo sapiens
  Table A; Target 96401; HLA-B*35:03; TUBA3C; ENSG00000198033; TAA
VPGGDLAKV

SEQ ID NO: 96402 - protein, 9 aa, Homo sapiens
  Table A; Target 96402; HLA-B*51:01; TUBA3C; ENSG00000198033; TAA
VPGGDLAKV

SEQ ID NO: 96403 - protein, 9 aa, Homo sapiens
  Table A; Target 96403; HLA-B*55:01; TUBA3C; ENSG00000198033; TAA
VPGGDLAKV

SEQ ID NO: 96404 - protein, 9 aa, Homo sapiens
  Table A; Target 96404; HLA-B*56:01; TUBA3C; ENSG00000198033; TAA
VPGGDLAKV

SEQ ID NO: 96405 - protein, 11 aa, Homo sapiens
  Table A; Target 96405; HLA-A*68:01; TUBA3C; ENSG00000198033; TAA
VPGGDLAKVQR

SEQ ID NO: 96406 - protein, 8 aa, Homo sapiens
  Table A; Target 96406; HLA-B*54:01; TUBA3C; ENSG00000198033; TAA
VPKDVNAA

SEQ ID NO: 96407 - protein, 8 aa, Homo sapiens
  Table A; Target 96407; HLA-B*55:01; TUBA3C; ENSG00000198033; TAA
VPKDVNAA

SEQ ID NO: 96408 - protein, 8 aa, Homo sapiens
  Table A; Target 96408; HLA-B*56:01; TUBA3C; ENSG00000198033; TAA
VPKDVNAA

SEQ ID NO: 96409 - protein, 9 aa, Homo sapiens
  Table A; Target 96409; HLA-A*02:03; TUBA3C; ENSG00000198033; TAA
VPKDVNAAI

SEQ ID NO: 96410 - protein, 9 aa, Homo sapiens
  Table A; Target 96410; HLA-A*23:01; TUBA3C; ENSG00000198033; TAA
VPKDVNAAI

SEQ ID NO: 96411 - protein, 9 aa, Homo sapiens
  Table A; Target 96411; HLA-A*24:02; TUBA3C; ENSG00000198033; TAA
VPKDVNAAI

SEQ ID NO: 96412 - protein, 9 aa, Homo sapiens
  Table A; Target 96412; HLA-A*25:01; TUBA3C; ENSG00000198033; TAA
VPKDVNAAI

SEQ ID NO: 96413 - protein, 9 aa, Homo sapiens
  Table A; Target 96413; HLA-A*30:01; TUBA3C; ENSG00000198033; TAA
VPKDVNAAI

SEQ ID NO: 96414 - protein, 9 aa, Homo sapiens
  Table A; Target 96414; HLA-A*31:01; TUBA3C; ENSG00000198033; TAA
VPKDVNAAI

SEQ ID NO: 96415 - protein, 9 aa, Homo sapiens
  Table A; Target 96415; HLA-A*32:01; TUBA3C; ENSG00000198033; TAA
VPKDVNAAI

SEQ ID NO: 96416 - protein, 9 aa, Homo sapiens
  Table A; Target 96416; HLA-A*33:01; TUBA3C; ENSG00000198033; TAA
VPKDVNAAI

SEQ ID NO: 96417 - protein, 9 aa, Homo sapiens
  Table A; Target 96417; HLA-A*33:03; TUBA3C; ENSG00000198033; TAA
VPKDVNAAI

SEQ ID NO: 96418 - protein, 9 aa, Homo sapiens
  Table A; Target 96418; HLA-A*68:01; TUBA3C; ENSG00000198033; TAA
VPKDVNAAI

SEQ ID NO: 96419 - protein, 9 aa, Homo sapiens
  Table A; Target 96419; HLA-A*68:02; TUBA3C; ENSG00000198033; TAA
VPKDVNAAI

SEQ ID NO: 96420 - protein, 9 aa, Homo sapiens
  Table A; Target 96420; HLA-B*07:02; TUBA3C; ENSG00000198033; TAA
VPKDVNAAI

SEQ ID NO: 96421 - protein, 9 aa, Homo sapiens
  Table A; Target 96421; HLA-B*08:01; TUBA3C; ENSG00000198033; TAA
VPKDVNAAI

SEQ ID NO: 96422 - protein, 9 aa, Homo sapiens
  Table A; Target 96422; HLA-B*13:02; TUBA3C; ENSG00000198033; TAA
VPKDVNAAI

SEQ ID NO: 96423 - protein, 9 aa, Homo sapiens
  Table A; Target 96423; HLA-B*35:01; TUBA3C; ENSG00000198033; TAA
VPKDVNAAI

SEQ ID NO: 96424 - protein, 9 aa, Homo sapiens
  Table A; Target 96424; HLA-B*35:03; TUBA3C; ENSG00000198033; TAA
VPKDVNAAI

SEQ ID NO: 96425 - protein, 9 aa, Homo sapiens
  Table A; Target 96425; HLA-B*40:02; TUBA3C; ENSG00000198033; TAA
VPKDVNAAI

SEQ ID NO: 96426 - protein, 9 aa, Homo sapiens
  Table A; Target 96426; HLA-B*44:02; TUBA3C; ENSG00000198033; TAA
VPKDVNAAI

SEQ ID NO: 96427 - protein, 9 aa, Homo sapiens
  Table A; Target 96427; HLA-B*46:01; TUBA3C; ENSG00000198033; TAA
VPKDVNAAI

SEQ ID NO: 96428 - protein, 9 aa, Homo sapiens
  Table A; Target 96428; HLA-B*51:01; TUBA3C; ENSG00000198033; TAA
VPKDVNAAI

SEQ ID NO: 96429 - protein, 9 aa, Homo sapiens
  Table A; Target 96429; HLA-B*54:01; TUBA3C; ENSG00000198033; TAA
VPKDVNAAI

SEQ ID NO: 96430 - protein, 9 aa, Homo sapiens
  Table A; Target 96430; HLA-B*55:01; TUBA3C; ENSG00000198033; TAA
VPKDVNAAI

SEQ ID NO: 96431 - protein, 9 aa, Homo sapiens
  Table A; Target 96431; HLA-B*56:01; TUBA3C; ENSG00000198033; TAA
VPKDVNAAI

SEQ ID NO: 96432 - protein, 9 aa, Homo sapiens
  Table A; Target 96432; HLA-B*57:01; TUBA3C; ENSG00000198033; TAA
VPKDVNAAI

SEQ ID NO: 96433 - protein, 9 aa, Homo sapiens
  Table A; Target 96433; HLA-B*58:01; TUBA3C; ENSG00000198033; TAA
VPKDVNAAI

SEQ ID NO: 96434 - protein, 9 aa, Homo sapiens
  Table A; Target 96434; HLA-C*01:02; TUBA3C; ENSG00000198033; TAA
VPKDVNAAI

SEQ ID NO: 96435 - protein, 9 aa, Homo sapiens
  Table A; Target 96435; HLA-C*02:02; TUBA3C; ENSG00000198033; TAA
VPKDVNAAI

SEQ ID NO: 96436 - protein, 9 aa, Homo sapiens
  Table A; Target 96436; HLA-C*03:03; TUBA3C; ENSG00000198033; TAA
VPKDVNAAI

SEQ ID NO: 96437 - protein, 9 aa, Homo sapiens
  Table A; Target 96437; HLA-C*03:04; TUBA3C; ENSG00000198033; TAA
VPKDVNAAI

SEQ ID NO: 96438 - protein, 9 aa, Homo sapiens
  Table A; Target 96438; HLA-C*04:01; TUBA3C; ENSG00000198033; TAA
VPKDVNAAI

SEQ ID NO: 96439 - protein, 9 aa, Homo sapiens
  Table A; Target 96439; HLA-C*06:02; TUBA3C; ENSG00000198033; TAA
VPKDVNAAI

SEQ ID NO: 96440 - protein, 9 aa, Homo sapiens
  Table A; Target 96440; HLA-C*07:01; TUBA3C; ENSG00000198033; TAA
VPKDVNAAI

SEQ ID NO: 96441 - protein, 9 aa, Homo sapiens
  Table A; Target 96441; HLA-C*07:02; TUBA3C; ENSG00000198033; TAA
VPKDVNAAI

SEQ ID NO: 96442 - protein, 9 aa, Homo sapiens
  Table A; Target 96442; HLA-C*07:06; TUBA3C; ENSG00000198033; TAA
VPKDVNAAI

SEQ ID NO: 96443 - protein, 9 aa, Homo sapiens
  Table A; Target 96443; HLA-C*12:03; TUBA3C; ENSG00000198033; TAA
VPKDVNAAI

SEQ ID NO: 96444 - protein, 9 aa, Homo sapiens
  Table A; Target 96444; HLA-C*14:02; TUBA3C; ENSG00000198033; TAA
VPKDVNAAI

SEQ ID NO: 96445 - protein, 9 aa, Homo sapiens
  Table A; Target 96445; HLA-C*16:01; TUBA3C; ENSG00000198033; TAA
VPKDVNAAI

SEQ ID NO: 96446 - protein, 9 aa, Homo sapiens
  Table A; Target 96446; HLA-C*16:02; TUBA3C; ENSG00000198033; TAA
VPKDVNAAI

SEQ ID NO: 96447 - protein, 10 aa, Homo sapiens
  Table A; Target 96447; HLA-B*07:02; TUBA3C; ENSG00000198033; TAA
VPKDVNAAIA

SEQ ID NO: 96448 - protein, 10 aa, Homo sapiens
  Table A; Target 96448; HLA-B*54:01; TUBA3C; ENSG00000198033; TAA
VPKDVNAAIA

SEQ ID NO: 96449 - protein, 10 aa, Homo sapiens
  Table A; Target 96449; HLA-B*55:01; TUBA3C; ENSG00000198033; TAA
VPKDVNAAIA

SEQ ID NO: 96450 - protein, 10 aa, Homo sapiens
  Table A; Target 96450; HLA-B*56:01; TUBA3C; ENSG00000198033; TAA
VPKDVNAAIA

SEQ ID NO: 96451 - protein, 10 aa, Homo sapiens
  Table A; Target 96451; HLA-C*07:02; TUBA3C; ENSG00000198033; TAA
VPKDVNAAIA

SEQ ID NO: 96452 - protein, 11 aa, Homo sapiens
  Table A; Target 96452; HLA-B*54:01; TUBA3C; ENSG00000198033; TAA
VPKDVNAAIAT

SEQ ID NO: 96453 - protein, 11 aa, Homo sapiens
  Table A; Target 96453; HLA-B*55:01; TUBA3C; ENSG00000198033; TAA
VPKDVNAAIAT

SEQ ID NO: 96454 - protein, 11 aa, Homo sapiens
  Table A; Target 96454; HLA-B*56:01; TUBA3C; ENSG00000198033; TAA
VPKDVNAAIAT

SEQ ID NO: 96455 - protein, 11 aa, Homo sapiens
  Table A; Target 96455; HLA-C*06:02; TUBA3C; ENSG00000198033; TAA
VPKDVNAAIAT

SEQ ID NO: 96456 - protein, 11 aa, Homo sapiens
  Table A; Target 96456; HLA-C*07:02; TUBA3C; ENSG00000198033; TAA
VPKDVNAAIAT

SEQ ID NO: 96457 - protein, 9 aa, Homo sapiens
  Table A; Target 96457; HLA-B*07:02; TUBA3C; ENSG00000198033; TAA
VPRAVFVDL

SEQ ID NO: 96458 - protein, 9 aa, Homo sapiens
  Table A; Target 96458; HLA-B*08:01; TUBA3C; ENSG00000198033; TAA
VPRAVFVDL

SEQ ID NO: 96459 - protein, 9 aa, Homo sapiens
  Table A; Target 96459; HLA-B*35:01; TUBA3C; ENSG00000198033; TAA
VPRAVFVDL

SEQ ID NO: 96460 - protein, 9 aa, Homo sapiens
  Table A; Target 96460; HLA-B*35:03; TUBA3C; ENSG00000198033; TAA
VPRAVFVDL

SEQ ID NO: 96461 - protein, 9 aa, Homo sapiens
  Table A; Target 96461; HLA-B*40:02; TUBA3C; ENSG00000198033; TAA
VPRAVFVDL

SEQ ID NO: 96462 - protein, 9 aa, Homo sapiens
  Table A; Target 96462; HLA-B*51:01; TUBA3C; ENSG00000198033; TAA
VPRAVFVDL

SEQ ID NO: 96463 - protein, 9 aa, Homo sapiens
  Table A; Target 96463; HLA-B*54:01; TUBA3C; ENSG00000198033; TAA
VPRAVFVDL

SEQ ID NO: 96464 - protein, 9 aa, Homo sapiens
  Table A; Target 96464; HLA-B*56:01; TUBA3C; ENSG00000198033; TAA
VPRAVFVDL

SEQ ID NO: 96465 - protein, 9 aa, Homo sapiens
  Table A; Target 96465; HLA-C*07:02; TUBA3C; ENSG00000198033; TAA
VPRAVFVDL

SEQ ID NO: 96466 - protein, 8 aa, Homo sapiens
  Table A; Target 96466; HLA-A*23:01; TUBA3C; ENSG00000198033; TAA
VPYPRIHF

SEQ ID NO: 96467 - protein, 8 aa, Homo sapiens
  Table A; Target 96467; HLA-B*07:02; TUBA3C; ENSG00000198033; TAA
VPYPRIHF

SEQ ID NO: 96468 - protein, 8 aa, Homo sapiens
  Table A; Target 96468; HLA-B*08:01; TUBA3C; ENSG00000198033; TAA
VPYPRIHF

SEQ ID NO: 96469 - protein, 8 aa, Homo sapiens
  Table A; Target 96469; HLA-B*51:01; TUBA3C; ENSG00000198033; TAA
VPYPRIHF

SEQ ID NO: 96470 - protein, 8 aa, Homo sapiens
  Table A; Target 96470; HLA-B*54:01; TUBA3C; ENSG00000198033; TAA
VPYPRIHF

SEQ ID NO: 96471 - protein, 8 aa, Homo sapiens
  Table A; Target 96471; HLA-B*56:01; TUBA3C; ENSG00000198033; TAA
VPYPRIHF

SEQ ID NO: 96472 - protein, 8 aa, Homo sapiens
  Table A; Target 96472; HLA-B*57:01; TUBA3C; ENSG00000198033; TAA
VPYPRIHF

SEQ ID NO: 96473 - protein, 8 aa, Homo sapiens
  Table A; Target 96473; HLA-C*04:01; TUBA3C; ENSG00000198033; TAA
VPYPRIHF

SEQ ID NO: 96474 - protein, 8 aa, Homo sapiens
  Table A; Target 96474; HLA-C*07:01; TUBA3C; ENSG00000198033; TAA
VPYPRIHF

SEQ ID NO: 96475 - protein, 8 aa, Homo sapiens
  Table A; Target 96475; HLA-C*07:02; TUBA3C; ENSG00000198033; TAA
VPYPRIHF

SEQ ID NO: 96476 - protein, 8 aa, Homo sapiens
  Table A; Target 96476; HLA-C*16:01; TUBA3C; ENSG00000198033; TAA
VPYPRIHF

SEQ ID NO: 96477 - protein, 9 aa, Homo sapiens
  Table A; Target 96477; HLA-B*07:02; TUBA3C; ENSG00000198033; TAA
VPYPRIHFP

SEQ ID NO: 96478 - protein, 9 aa, Homo sapiens
  Table A; Target 96478; HLA-B*51:01; TUBA3C; ENSG00000198033; TAA
VPYPRIHFP

SEQ ID NO: 96479 - protein, 9 aa, Homo sapiens
  Table A; Target 96479; HLA-B*54:01; TUBA3C; ENSG00000198033; TAA
VPYPRIHFP

SEQ ID NO: 96480 - protein, 9 aa, Homo sapiens
  Table A; Target 96480; HLA-B*55:01; TUBA3C; ENSG00000198033; TAA
VPYPRIHFP

SEQ ID NO: 96481 - protein, 9 aa, Homo sapiens
  Table A; Target 96481; HLA-B*56:01; TUBA3C; ENSG00000198033; TAA
VPYPRIHFP

SEQ ID NO: 96482 - protein, 10 aa, Homo sapiens
  Table A; Target 96482; HLA-A*24:02; TUBA3C; ENSG00000198033; TAA
VPYPRIHFPL

SEQ ID NO: 96483 - protein, 10 aa, Homo sapiens
  Table A; Target 96483; HLA-A*31:01; TUBA3C; ENSG00000198033; TAA
VPYPRIHFPL

SEQ ID NO: 96484 - protein, 10 aa, Homo sapiens
  Table A; Target 96484; HLA-B*54:01; TUBA3C; ENSG00000198033; TAA
VPYPRIHFPL

SEQ ID NO: 96485 - protein, 11 aa, Homo sapiens
  Table A; Target 96485; HLA-B*51:01; TUBA3C; ENSG00000198033; TAA
VPYPRIHFPLA

SEQ ID NO: 96486 - protein, 11 aa, Homo sapiens
  Table A; Target 96486; HLA-B*54:01; TUBA3C; ENSG00000198033; TAA
VPYPRIHFPLA

SEQ ID NO: 96487 - protein, 8 aa, Homo sapiens
  Table A; Target 96487; HLA-A*32:01; TUBA3C; ENSG00000198033; TAA
VQIGNACW

SEQ ID NO: 96488 - protein, 8 aa, Homo sapiens
  Table A; Target 96488; HLA-B*15:01; TUBA3C; ENSG00000198033; TAA
VQIGNACW

SEQ ID NO: 96489 - protein, 8 aa, Homo sapiens
  Table A; Target 96489; HLA-B*58:01; TUBA3C; ENSG00000198033; TAA
VQIGNACW

SEQ ID NO: 96490 - protein, 10 aa, Homo sapiens
  Table A; Target 96490; HLA-B*27:05; TUBA3C; ENSG00000198033; TAA
VQIGNACWEL

SEQ ID NO: 96491 - protein, 8 aa, Homo sapiens
  Table A; Target 96491; HLA-B*08:01; TUBA3C; ENSG00000198033; TAA
VQRAVCML

SEQ ID NO: 96492 - protein, 8 aa, Homo sapiens
  Table A; Target 96492; HLA-B*15:01; TUBA3C; ENSG00000198033; TAA
VQRAVCML

SEQ ID NO: 96493 - protein, 8 aa, Homo sapiens
  Table A; Target 96493; HLA-B*15:03; TUBA3C; ENSG00000198033; TAA
VQRAVCML

SEQ ID NO: 96494 - protein, 8 aa, Homo sapiens
  Table A; Target 96494; HLA-B*40:02; TUBA3C; ENSG00000198033; TAA
VQRAVCML

SEQ ID NO: 96495 - protein, 8 aa, Homo sapiens
  Table A; Target 96495; HLA-C*06:02; TUBA3C; ENSG00000198033; TAA
VQRAVCML

SEQ ID NO: 96496 - protein, 8 aa, Homo sapiens
  Table A; Target 96496; HLA-C*07:04; TUBA3C; ENSG00000198033; TAA
VQRAVCML

SEQ ID NO: 96497 - protein, 9 aa, Homo sapiens
  Table A; Target 96497; HLA-B*07:02; TUBA3C; ENSG00000198033; TAA
VRTGTYRQL

SEQ ID NO: 96498 - protein, 9 aa, Homo sapiens
  Table A; Target 96498; HLA-B*27:05; TUBA3C; ENSG00000198033; TAA
VRTGTYRQL

SEQ ID NO: 96499 - protein, 9 aa, Homo sapiens
  Table A; Target 96499; HLA-C*06:02; TUBA3C; ENSG00000198033; TAA
VRTGTYRQL

SEQ ID NO: 96500 - protein, 9 aa, Homo sapiens
  Table A; Target 96500; HLA-C*07:01; TUBA3C; ENSG00000198033; TAA
VRTGTYRQL

SEQ ID NO: 96501 - protein, 9 aa, Homo sapiens
  Table A; Target 96501; HLA-C*07:02; TUBA3C; ENSG00000198033; TAA
VRTGTYRQL

SEQ ID NO: 96502 - protein, 9 aa, Homo sapiens
  Table A; Target 96502; HLA-C*12:03; TUBA3C; ENSG00000198033; TAA
VRTGTYRQL

SEQ ID NO: 96503 - protein, 9 aa, Homo sapiens
  Table A; Target 96503; HLA-C*16:01; TUBA3C; ENSG00000198033; TAA
VRTGTYRQL

SEQ ID NO: 96504 - protein, 9 aa, Homo sapiens
  Table A; Target 96504; HLA-C*16:02; TUBA3C; ENSG00000198033; TAA
VRTGTYRQL

SEQ ID NO: 96505 - protein, 10 aa, Homo sapiens
  Table A; Target 96505; HLA-C*07:01; TUBA3C; ENSG00000198033; TAA
VRTGTYRQLF

SEQ ID NO: 96506 - protein, 8 aa, Homo sapiens
  Table A; Target 96506; HLA-B*07:02; TUBA3C; ENSG00000198033; TAA
VSSITASL

SEQ ID NO: 96507 - protein, 8 aa, Homo sapiens
  Table A; Target 96507; HLA-B*08:01; TUBA3C; ENSG00000198033; TAA
VSSITASL

SEQ ID NO: 96508 - protein, 8 aa, Homo sapiens
  Table A; Target 96508; HLA-B*15:01; TUBA3C; ENSG00000198033; TAA
VSSITASL

SEQ ID NO: 96509 - protein, 8 aa, Homo sapiens
  Table A; Target 96509; HLA-B*37:01; TUBA3C; ENSG00000198033; TAA
VSSITASL

SEQ ID NO: 96510 - protein, 8 aa, Homo sapiens
  Table A; Target 96510; HLA-B*46:01; TUBA3C; ENSG00000198033; TAA
VSSITASL

SEQ ID NO: 96511 - protein, 8 aa, Homo sapiens
  Table A; Target 96511; HLA-B*58:01; TUBA3C; ENSG00000198033; TAA
VSSITASL

SEQ ID NO: 96512 - protein, 8 aa, Homo sapiens
  Table A; Target 96512; HLA-C*01:02; TUBA3C; ENSG00000198033; TAA
VSSITASL

SEQ ID NO: 96513 - protein, 8 aa, Homo sapiens
  Table A; Target 96513; HLA-C*03:03; TUBA3C; ENSG00000198033; TAA
VSSITASL

SEQ ID NO: 96514 - protein, 8 aa, Homo sapiens
  Table A; Target 96514; HLA-C*03:04; TUBA3C; ENSG00000198033; TAA
VSSITASL

SEQ ID NO: 96515 - protein, 8 aa, Homo sapiens
  Table A; Target 96515; HLA-C*05:01; TUBA3C; ENSG00000198033; TAA
VSSITASL

SEQ ID NO: 96516 - protein, 8 aa, Homo sapiens
  Table A; Target 96516; HLA-C*14:02; TUBA3C; ENSG00000198033; TAA
VSSITASL

SEQ ID NO: 96517 - protein, 8 aa, Homo sapiens
  Table A; Target 96517; HLA-C*16:01; TUBA3C; ENSG00000198033; TAA
VSSITASL

SEQ ID NO: 96518 - protein, 9 aa, Homo sapiens
  Table A; Target 96518; HLA-A*01:01; TUBA3C; ENSG00000198033; TAA
VSSITASLR

SEQ ID NO: 96519 - protein, 9 aa, Homo sapiens
  Table A; Target 96519; HLA-A*03:01; TUBA3C; ENSG00000198033; TAA
VSSITASLR

SEQ ID NO: 96520 - protein, 9 aa, Homo sapiens
  Table A; Target 96520; HLA-A*03:02; TUBA3C; ENSG00000198033; TAA
VSSITASLR

SEQ ID NO: 96521 - protein, 9 aa, Homo sapiens
  Table A; Target 96521; HLA-A*11:01; TUBA3C; ENSG00000198033; TAA
VSSITASLR

SEQ ID NO: 96522 - protein, 9 aa, Homo sapiens
  Table A; Target 96522; HLA-A*31:01; TUBA3C; ENSG00000198033; TAA
VSSITASLR

SEQ ID NO: 96523 - protein, 9 aa, Homo sapiens
  Table A; Target 96523; HLA-A*33:01; TUBA3C; ENSG00000198033; TAA
VSSITASLR

SEQ ID NO: 96524 - protein, 9 aa, Homo sapiens
  Table A; Target 96524; HLA-A*33:03; TUBA3C; ENSG00000198033; TAA
VSSITASLR

SEQ ID NO: 96525 - protein, 9 aa, Homo sapiens
  Table A; Target 96525; HLA-A*68:01; TUBA3C; ENSG00000198033; TAA
VSSITASLR

SEQ ID NO: 96526 - protein, 9 aa, Homo sapiens
  Table A; Target 96526; HLA-B*27:02; TUBA3C; ENSG00000198033; TAA
VSSITASLR

SEQ ID NO: 96527 - protein, 9 aa, Homo sapiens
  Table A; Target 96527; HLA-B*57:01; TUBA3C; ENSG00000198033; TAA
VSSITASLR

SEQ ID NO: 96528 - protein, 9 aa, Homo sapiens
  Table A; Target 96528; HLA-C*06:02; TUBA3C; ENSG00000198033; TAA
VSSITASLR

SEQ ID NO: 96529 - protein, 9 aa, Homo sapiens
  Table A; Target 96529; HLA-C*07:06; TUBA3C; ENSG00000198033; TAA
VSSITASLR

SEQ ID NO: 96530 - protein, 10 aa, Homo sapiens
  Table A; Target 96530; HLA-A*01:01; TUBA3C; ENSG00000198033; TAA
VSSITASLRF

SEQ ID NO: 96531 - protein, 10 aa, Homo sapiens
  Table A; Target 96531; HLA-B*57:01; TUBA3C; ENSG00000198033; TAA
VSSITASLRF

SEQ ID NO: 96532 - protein, 10 aa, Homo sapiens
  Table A; Target 96532; HLA-B*58:01; TUBA3C; ENSG00000198033; TAA
VSSITASLRF

SEQ ID NO: 96533 - protein, 10 aa, Homo sapiens
  Table A; Target 96533; HLA-C*04:01; TUBA3C; ENSG00000198033; TAA
VSSITASLRF

SEQ ID NO: 96534 - protein, 10 aa, Homo sapiens
  Table A; Target 96534; HLA-C*07:01; TUBA3C; ENSG00000198033; TAA
VSSITASLRF

SEQ ID NO: 96535 - protein, 9 aa, Homo sapiens
  Table A; Target 96535; HLA-A*01:01; TUBA3C; ENSG00000198033; TAA
VSTAVVEPY

SEQ ID NO: 96536 - protein, 9 aa, Homo sapiens
  Table A; Target 96536; HLA-A*02:01; TUBA3C; ENSG00000198033; TAA
VSTAVVEPY

SEQ ID NO: 96537 - protein, 9 aa, Homo sapiens
  Table A; Target 96537; HLA-A*03:01; TUBA3C; ENSG00000198033; TAA
VSTAVVEPY

SEQ ID NO: 96538 - protein, 9 aa, Homo sapiens
  Table A; Target 96538; HLA-A*03:02; TUBA3C; ENSG00000198033; TAA
VSTAVVEPY

SEQ ID NO: 96539 - protein, 9 aa, Homo sapiens
  Table A; Target 96539; HLA-A*11:01; TUBA3C; ENSG00000198033; TAA
VSTAVVEPY

SEQ ID NO: 96540 - protein, 9 aa, Homo sapiens
  Table A; Target 96540; HLA-A*23:01; TUBA3C; ENSG00000198033; TAA
VSTAVVEPY

SEQ ID NO: 96541 - protein, 9 aa, Homo sapiens
  Table A; Target 96541; HLA-A*24:02; TUBA3C; ENSG00000198033; TAA
VSTAVVEPY

SEQ ID NO: 96542 - protein, 9 aa, Homo sapiens
  Table A; Target 96542; HLA-A*26:01; TUBA3C; ENSG00000198033; TAA
VSTAVVEPY

SEQ ID NO: 96543 - protein, 9 aa, Homo sapiens
  Table A; Target 96543; HLA-A*29:02; TUBA3C; ENSG00000198033; TAA
VSTAVVEPY

SEQ ID NO: 96544 - protein, 9 aa, Homo sapiens
  Table A; Target 96544; HLA-A*30:02; TUBA3C; ENSG00000198033; TAA
VSTAVVEPY

SEQ ID NO: 96545 - protein, 9 aa, Homo sapiens
  Table A; Target 96545; HLA-A*31:01; TUBA3C; ENSG00000198033; TAA
VSTAVVEPY

SEQ ID NO: 96546 - protein, 9 aa, Homo sapiens
  Table A; Target 96546; HLA-A*32:01; TUBA3C; ENSG00000198033; TAA
VSTAVVEPY

SEQ ID NO: 96547 - protein, 9 aa, Homo sapiens
  Table A; Target 96547; HLA-A*33:01; TUBA3C; ENSG00000198033; TAA
VSTAVVEPY

SEQ ID NO: 96548 - protein, 9 aa, Homo sapiens
  Table A; Target 96548; HLA-A*33:03; TUBA3C; ENSG00000198033; TAA
VSTAVVEPY

SEQ ID NO: 96549 - protein, 9 aa, Homo sapiens
  Table A; Target 96549; HLA-A*68:01; TUBA3C; ENSG00000198033; TAA
VSTAVVEPY

SEQ ID NO: 96550 - protein, 9 aa, Homo sapiens
  Table A; Target 96550; HLA-B*07:02; TUBA3C; ENSG00000198033; TAA
VSTAVVEPY

SEQ ID NO: 96551 - protein, 9 aa, Homo sapiens
  Table A; Target 96551; HLA-B*15:01; TUBA3C; ENSG00000198033; TAA
VSTAVVEPY

SEQ ID NO: 96552 - protein, 9 aa, Homo sapiens
  Table A; Target 96552; HLA-B*15:03; TUBA3C; ENSG00000198033; TAA
VSTAVVEPY

SEQ ID NO: 96553 - protein, 9 aa, Homo sapiens
  Table A; Target 96553; HLA-B*18:01; TUBA3C; ENSG00000198033; TAA
VSTAVVEPY

SEQ ID NO: 96554 - protein, 9 aa, Homo sapiens
  Table A; Target 96554; HLA-B*27:02; TUBA3C; ENSG00000198033; TAA
VSTAVVEPY

SEQ ID NO: 96555 - protein, 9 aa, Homo sapiens
  Table A; Target 96555; HLA-B*27:05; TUBA3C; ENSG00000198033; TAA
VSTAVVEPY

SEQ ID NO: 96556 - protein, 9 aa, Homo sapiens
  Table A; Target 96556; HLA-B*35:01; TUBA3C; ENSG00000198033; TAA
VSTAVVEPY

SEQ ID NO: 96557 - protein, 9 aa, Homo sapiens
  Table A; Target 96557; HLA-B*39:01; TUBA3C; ENSG00000198033; TAA
VSTAVVEPY

SEQ ID NO: 96558 - protein, 9 aa, Homo sapiens
  Table A; Target 96558; HLA-B*40:02; TUBA3C; ENSG00000198033; TAA
VSTAVVEPY

SEQ ID NO: 96559 - protein, 9 aa, Homo sapiens
  Table A; Target 96559; HLA-B*46:01; TUBA3C; ENSG00000198033; TAA
VSTAVVEPY

SEQ ID NO: 96560 - protein, 9 aa, Homo sapiens
  Table A; Target 96560; HLA-B*54:01; TUBA3C; ENSG00000198033; TAA
VSTAVVEPY

SEQ ID NO: 96561 - protein, 9 aa, Homo sapiens
  Table A; Target 96561; HLA-B*55:01; TUBA3C; ENSG00000198033; TAA
VSTAVVEPY

SEQ ID NO: 96562 - protein, 9 aa, Homo sapiens
  Table A; Target 96562; HLA-B*57:01; TUBA3C; ENSG00000198033; TAA
VSTAVVEPY

SEQ ID NO: 96563 - protein, 9 aa, Homo sapiens
  Table A; Target 96563; HLA-B*58:01; TUBA3C; ENSG00000198033; TAA
VSTAVVEPY

SEQ ID NO: 96564 - protein, 9 aa, Homo sapiens
  Table A; Target 96564; HLA-C*01:02; TUBA3C; ENSG00000198033; TAA
VSTAVVEPY

SEQ ID NO: 96565 - protein, 9 aa, Homo sapiens
  Table A; Target 96565; HLA-C*02:02; TUBA3C; ENSG00000198033; TAA
VSTAVVEPY

SEQ ID NO: 96566 - protein, 9 aa, Homo sapiens
  Table A; Target 96566; HLA-C*03:03; TUBA3C; ENSG00000198033; TAA
VSTAVVEPY

SEQ ID NO: 96567 - protein, 9 aa, Homo sapiens
  Table A; Target 96567; HLA-C*03:04; TUBA3C; ENSG00000198033; TAA
VSTAVVEPY

SEQ ID NO: 96568 - protein, 9 aa, Homo sapiens
  Table A; Target 96568; HLA-C*04:01; TUBA3C; ENSG00000198033; TAA
VSTAVVEPY

SEQ ID NO: 96569 - protein, 9 aa, Homo sapiens
  Table A; Target 96569; HLA-C*06:02; TUBA3C; ENSG00000198033; TAA
VSTAVVEPY

SEQ ID NO: 96570 - protein, 9 aa, Homo sapiens
  Table A; Target 96570; HLA-C*07:01; TUBA3C; ENSG00000198033; TAA
VSTAVVEPY

SEQ ID NO: 96571 - protein, 9 aa, Homo sapiens
  Table A; Target 96571; HLA-C*07:02; TUBA3C; ENSG00000198033; TAA
VSTAVVEPY

SEQ ID NO: 96572 - protein, 9 aa, Homo sapiens
  Table A; Target 96572; HLA-C*07:04; TUBA3C; ENSG00000198033; TAA
VSTAVVEPY

SEQ ID NO: 96573 - protein, 9 aa, Homo sapiens
  Table A; Target 96573; HLA-C*07:06; TUBA3C; ENSG00000198033; TAA
VSTAVVEPY

SEQ ID NO: 96574 - protein, 9 aa, Homo sapiens
  Table A; Target 96574; HLA-C*12:03; TUBA3C; ENSG00000198033; TAA
VSTAVVEPY

SEQ ID NO: 96575 - protein, 9 aa, Homo sapiens
  Table A; Target 96575; HLA-C*14:02; TUBA3C; ENSG00000198033; TAA
VSTAVVEPY

SEQ ID NO: 96576 - protein, 9 aa, Homo sapiens
  Table A; Target 96576; HLA-C*16:01; TUBA3C; ENSG00000198033; TAA
VSTAVVEPY

SEQ ID NO: 96577 - protein, 9 aa, Homo sapiens
  Table A; Target 96577; HLA-C*16:02; TUBA3C; ENSG00000198033; TAA
VSTAVVEPY

SEQ ID NO: 96578 - protein, 9 aa, Homo sapiens
  Table A; Target 96578; HLA-C*16:04; TUBA3C; ENSG00000198033; TAA
VSTAVVEPY

SEQ ID NO: 96579 - protein, 10 aa, Homo sapiens
  Table A; Target 96579; HLA-A*01:01; TUBA3C; ENSG00000198033; TAA
VSTAVVEPYN

SEQ ID NO: 96580 - protein, 10 aa, Homo sapiens
  Table A; Target 96580; HLA-C*06:02; TUBA3C; ENSG00000198033; TAA
VSTAVVEPYN

SEQ ID NO: 96581 - protein, 8 aa, Homo sapiens
  Table A; Target 96581; HLA-C*05:01; TUBA3C; ENSG00000198033; TAA
VVDEVRTG

SEQ ID NO: 96582 - protein, 9 aa, Homo sapiens
  Table A; Target 96582; HLA-A*02:07; TUBA3C; ENSG00000198033; TAA
VVDEVRTGT

SEQ ID NO: 96583 - protein, 9 aa, Homo sapiens
  Table A; Target 96583; HLA-A*32:01; TUBA3C; ENSG00000198033; TAA
VVDEVRTGT

SEQ ID NO: 96584 - protein, 9 aa, Homo sapiens
  Table A; Target 96584; HLA-B*58:01; TUBA3C; ENSG00000198033; TAA
VVDEVRTGT

SEQ ID NO: 96585 - protein, 9 aa, Homo sapiens
  Table A; Target 96585; HLA-C*05:01; TUBA3C; ENSG00000198033; TAA
VVDEVRTGT

SEQ ID NO: 96586 - protein, 10 aa, Homo sapiens
  Table A; Target 96586; HLA-A*01:01; TUBA3C; ENSG00000198033; TAA
VVDEVRTGTY

SEQ ID NO: 96587 - protein, 10 aa, Homo sapiens
  Table A; Target 96587; HLA-A*02:07; TUBA3C; ENSG00000198033; TAA
VVDEVRTGTY

SEQ ID NO: 96588 - protein, 10 aa, Homo sapiens
  Table A; Target 96588; HLA-A*03:01; TUBA3C; ENSG00000198033; TAA
VVDEVRTGTY

SEQ ID NO: 96589 - protein, 10 aa, Homo sapiens
  Table A; Target 96589; HLA-A*03:02; TUBA3C; ENSG00000198033; TAA
VVDEVRTGTY

SEQ ID NO: 96590 - protein, 10 aa, Homo sapiens
  Table A; Target 96590; HLA-A*11:01; TUBA3C; ENSG00000198033; TAA
VVDEVRTGTY

SEQ ID NO: 96591 - protein, 10 aa, Homo sapiens
  Table A; Target 96591; HLA-A*23:01; TUBA3C; ENSG00000198033; TAA
VVDEVRTGTY

SEQ ID NO: 96592 - protein, 10 aa, Homo sapiens
  Table A; Target 96592; HLA-A*25:01; TUBA3C; ENSG00000198033; TAA
VVDEVRTGTY

SEQ ID NO: 96593 - protein, 10 aa, Homo sapiens
  Table A; Target 96593; HLA-A*26:01; TUBA3C; ENSG00000198033; TAA
VVDEVRTGTY

SEQ ID NO: 96594 - protein, 10 aa, Homo sapiens
  Table A; Target 96594; HLA-A*29:02; TUBA3C; ENSG00000198033; TAA
VVDEVRTGTY

SEQ ID NO: 96595 - protein, 10 aa, Homo sapiens
  Table A; Target 96595; HLA-A*30:02; TUBA3C; ENSG00000198033; TAA
VVDEVRTGTY

SEQ ID NO: 96596 - protein, 10 aa, Homo sapiens
  Table A; Target 96596; HLA-A*32:01; TUBA3C; ENSG00000198033; TAA
VVDEVRTGTY

SEQ ID NO: 96597 - protein, 10 aa, Homo sapiens
  Table A; Target 96597; HLA-A*33:03; TUBA3C; ENSG00000198033; TAA
VVDEVRTGTY

SEQ ID NO: 96598 - protein, 10 aa, Homo sapiens
  Table A; Target 96598; HLA-A*68:01; TUBA3C; ENSG00000198033; TAA
VVDEVRTGTY

SEQ ID NO: 96599 - protein, 10 aa, Homo sapiens
  Table A; Target 96599; HLA-B*07:02; TUBA3C; ENSG00000198033; TAA
VVDEVRTGTY

SEQ ID NO: 96600 - protein, 10 aa, Homo sapiens
  Table A; Target 96600; HLA-B*15:01; TUBA3C; ENSG00000198033; TAA
VVDEVRTGTY

SEQ ID NO: 96601 - protein, 10 aa, Homo sapiens
  Table A; Target 96601; HLA-B*15:03; TUBA3C; ENSG00000198033; TAA
VVDEVRTGTY

SEQ ID NO: 96602 - protein, 10 aa, Homo sapiens
  Table A; Target 96602; HLA-B*18:01; TUBA3C; ENSG00000198033; TAA
VVDEVRTGTY

SEQ ID NO: 96603 - protein, 10 aa, Homo sapiens
  Table A; Target 96603; HLA-B*27:02; TUBA3C; ENSG00000198033; TAA
VVDEVRTGTY

SEQ ID NO: 96604 - protein, 10 aa, Homo sapiens
  Table A; Target 96604; HLA-B*27:05; TUBA3C; ENSG00000198033; TAA
VVDEVRTGTY

SEQ ID NO: 96605 - protein, 10 aa, Homo sapiens
  Table A; Target 96605; HLA-B*35:01; TUBA3C; ENSG00000198033; TAA
VVDEVRTGTY

SEQ ID NO: 96606 - protein, 10 aa, Homo sapiens
  Table A; Target 96606; HLA-B*38:01; TUBA3C; ENSG00000198033; TAA
VVDEVRTGTY

SEQ ID NO: 96607 - protein, 10 aa, Homo sapiens
  Table A; Target 96607; HLA-B*39:01; TUBA3C; ENSG00000198033; TAA
VVDEVRTGTY

SEQ ID NO: 96608 - protein, 10 aa, Homo sapiens
  Table A; Target 96608; HLA-B*44:02; TUBA3C; ENSG00000198033; TAA
VVDEVRTGTY

SEQ ID NO: 96609 - protein, 10 aa, Homo sapiens
  Table A; Target 96609; HLA-B*44:03; TUBA3C; ENSG00000198033; TAA
VVDEVRTGTY

SEQ ID NO: 96610 - protein, 10 aa, Homo sapiens
  Table A; Target 96610; HLA-B*46:01; TUBA3C; ENSG00000198033; TAA
VVDEVRTGTY

SEQ ID NO: 96611 - protein, 10 aa, Homo sapiens
  Table A; Target 96611; HLA-B*55:01; TUBA3C; ENSG00000198033; TAA
VVDEVRTGTY

SEQ ID NO: 96612 - protein, 10 aa, Homo sapiens
  Table A; Target 96612; HLA-B*57:01; TUBA3C; ENSG00000198033; TAA
VVDEVRTGTY

SEQ ID NO: 96613 - protein, 10 aa, Homo sapiens
  Table A; Target 96613; HLA-B*58:01; TUBA3C; ENSG00000198033; TAA
VVDEVRTGTY

SEQ ID NO: 96614 - protein, 10 aa, Homo sapiens
  Table A; Target 96614; HLA-C*01:02; TUBA3C; ENSG00000198033; TAA
VVDEVRTGTY

SEQ ID NO: 96615 - protein, 10 aa, Homo sapiens
  Table A; Target 96615; HLA-C*02:02; TUBA3C; ENSG00000198033; TAA
VVDEVRTGTY

SEQ ID NO: 96616 - protein, 10 aa, Homo sapiens
  Table A; Target 96616; HLA-C*03:03; TUBA3C; ENSG00000198033; TAA
VVDEVRTGTY

SEQ ID NO: 96617 - protein, 10 aa, Homo sapiens
  Table A; Target 96617; HLA-C*03:04; TUBA3C; ENSG00000198033; TAA
VVDEVRTGTY

SEQ ID NO: 96618 - protein, 10 aa, Homo sapiens
  Table A; Target 96618; HLA-C*04:01; TUBA3C; ENSG00000198033; TAA
VVDEVRTGTY

SEQ ID NO: 96619 - protein, 10 aa, Homo sapiens
  Table A; Target 96619; HLA-C*05:01; TUBA3C; ENSG00000198033; TAA
VVDEVRTGTY

SEQ ID NO: 96620 - protein, 10 aa, Homo sapiens
  Table A; Target 96620; HLA-C*06:02; TUBA3C; ENSG00000198033; TAA
VVDEVRTGTY

SEQ ID NO: 96621 - protein, 10 aa, Homo sapiens
  Table A; Target 96621; HLA-C*07:01; TUBA3C; ENSG00000198033; TAA
VVDEVRTGTY

SEQ ID NO: 96622 - protein, 10 aa, Homo sapiens
  Table A; Target 96622; HLA-C*07:02; TUBA3C; ENSG00000198033; TAA
VVDEVRTGTY

SEQ ID NO: 96623 - protein, 10 aa, Homo sapiens
  Table A; Target 96623; HLA-C*07:04; TUBA3C; ENSG00000198033; TAA
VVDEVRTGTY

SEQ ID NO: 96624 - protein, 10 aa, Homo sapiens
  Table A; Target 96624; HLA-C*07:06; TUBA3C; ENSG00000198033; TAA
VVDEVRTGTY

SEQ ID NO: 96625 - protein, 10 aa, Homo sapiens
  Table A; Target 96625; HLA-C*12:03; TUBA3C; ENSG00000198033; TAA
VVDEVRTGTY

SEQ ID NO: 96626 - protein, 10 aa, Homo sapiens
  Table A; Target 96626; HLA-C*14:02; TUBA3C; ENSG00000198033; TAA
VVDEVRTGTY

SEQ ID NO: 96627 - protein, 10 aa, Homo sapiens
  Table A; Target 96627; HLA-C*16:01; TUBA3C; ENSG00000198033; TAA
VVDEVRTGTY

SEQ ID NO: 96628 - protein, 10 aa, Homo sapiens
  Table A; Target 96628; HLA-C*16:02; TUBA3C; ENSG00000198033; TAA
VVDEVRTGTY

SEQ ID NO: 96629 - protein, 10 aa, Homo sapiens
  Table A; Target 96629; HLA-C*16:04; TUBA3C; ENSG00000198033; TAA
VVDEVRTGTY

SEQ ID NO: 96630 - protein, 11 aa, Homo sapiens
  Table A; Target 96630; HLA-A*01:01; TUBA3C; ENSG00000198033; TAA
VVDEVRTGTYR

SEQ ID NO: 96631 - protein, 11 aa, Homo sapiens
  Table A; Target 96631; HLA-A*02:07; TUBA3C; ENSG00000198033; TAA
VVDEVRTGTYR

SEQ ID NO: 96632 - protein, 11 aa, Homo sapiens
  Table A; Target 96632; HLA-A*03:01; TUBA3C; ENSG00000198033; TAA
VVDEVRTGTYR

SEQ ID NO: 96633 - protein, 11 aa, Homo sapiens
  Table A; Target 96633; HLA-A*03:02; TUBA3C; ENSG00000198033; TAA
VVDEVRTGTYR

SEQ ID NO: 96634 - protein, 11 aa, Homo sapiens
  Table A; Target 96634; HLA-A*11:01; TUBA3C; ENSG00000198033; TAA
VVDEVRTGTYR

SEQ ID NO: 96635 - protein, 11 aa, Homo sapiens
  Table A; Target 96635; HLA-A*31:01; TUBA3C; ENSG00000198033; TAA
VVDEVRTGTYR

SEQ ID NO: 96636 - protein, 11 aa, Homo sapiens
  Table A; Target 96636; HLA-A*33:01; TUBA3C; ENSG00000198033; TAA
VVDEVRTGTYR

SEQ ID NO: 96637 - protein, 11 aa, Homo sapiens
  Table A; Target 96637; HLA-A*33:03; TUBA3C; ENSG00000198033; TAA
VVDEVRTGTYR

SEQ ID NO: 96638 - protein, 11 aa, Homo sapiens
  Table A; Target 96638; HLA-A*68:01; TUBA3C; ENSG00000198033; TAA
VVDEVRTGTYR

SEQ ID NO: 96639 - protein, 11 aa, Homo sapiens
  Table A; Target 96639; HLA-A*68:02; TUBA3C; ENSG00000198033; TAA
VVDEVRTGTYR

SEQ ID NO: 96640 - protein, 11 aa, Homo sapiens
  Table A; Target 96640; HLA-B*27:02; TUBA3C; ENSG00000198033; TAA
VVDEVRTGTYR

SEQ ID NO: 96641 - protein, 11 aa, Homo sapiens
  Table A; Target 96641; HLA-B*27:05; TUBA3C; ENSG00000198033; TAA
VVDEVRTGTYR

SEQ ID NO: 96642 - protein, 11 aa, Homo sapiens
  Table A; Target 96642; HLA-C*04:01; TUBA3C; ENSG00000198033; TAA
VVDEVRTGTYR

SEQ ID NO: 96643 - protein, 11 aa, Homo sapiens
  Table A; Target 96643; HLA-C*05:01; TUBA3C; ENSG00000198033; TAA
VVDEVRTGTYR

SEQ ID NO: 96644 - protein, 11 aa, Homo sapiens
  Table A; Target 96644; HLA-C*06:02; TUBA3C; ENSG00000198033; TAA
VVDEVRTGTYR

SEQ ID NO: 96645 - protein, 11 aa, Homo sapiens
  Table A; Target 96645; HLA-C*07:06; TUBA3C; ENSG00000198033; TAA
VVDEVRTGTYR

SEQ ID NO: 96646 - protein, 8 aa, Homo sapiens
  Table A; Target 96646; HLA-C*05:01; TUBA3C; ENSG00000198033; TAA
VVEPYNSI

SEQ ID NO: 96647 - protein, 9 aa, Homo sapiens
  Table A; Target 96647; HLA-A*01:01; TUBA3C; ENSG00000198033; TAA
VVEPYNSIL

SEQ ID NO: 96648 - protein, 9 aa, Homo sapiens
  Table A; Target 96648; HLA-A*02:07; TUBA3C; ENSG00000198033; TAA
VVEPYNSIL

SEQ ID NO: 96649 - protein, 9 aa, Homo sapiens
  Table A; Target 96649; HLA-A*68:02; TUBA3C; ENSG00000198033; TAA
VVEPYNSIL

SEQ ID NO: 96650 - protein, 9 aa, Homo sapiens
  Table A; Target 96650; HLA-B*07:02; TUBA3C; ENSG00000198033; TAA
VVEPYNSIL

SEQ ID NO: 96651 - protein, 9 aa, Homo sapiens
  Table A; Target 96651; HLA-B*27:05; TUBA3C; ENSG00000198033; TAA
VVEPYNSIL

SEQ ID NO: 96652 - protein, 9 aa, Homo sapiens
  Table A; Target 96652; HLA-B*35:03; TUBA3C; ENSG00000198033; TAA
VVEPYNSIL

SEQ ID NO: 96653 - protein, 9 aa, Homo sapiens
  Table A; Target 96653; HLA-B*38:01; TUBA3C; ENSG00000198033; TAA
VVEPYNSIL

SEQ ID NO: 96654 - protein, 9 aa, Homo sapiens
  Table A; Target 96654; HLA-B*39:01; TUBA3C; ENSG00000198033; TAA
VVEPYNSIL

SEQ ID NO: 96655 - protein, 9 aa, Homo sapiens
  Table A; Target 96655; HLA-B*40:01; TUBA3C; ENSG00000198033; TAA
VVEPYNSIL

SEQ ID NO: 96656 - protein, 9 aa, Homo sapiens
  Table A; Target 96656; HLA-B*58:01; TUBA3C; ENSG00000198033; TAA
VVEPYNSIL

SEQ ID NO: 96657 - protein, 9 aa, Homo sapiens
  Table A; Target 96657; HLA-C*01:02; TUBA3C; ENSG00000198033; TAA
VVEPYNSIL

SEQ ID NO: 96658 - protein, 9 aa, Homo sapiens
  Table A; Target 96658; HLA-C*03:03; TUBA3C; ENSG00000198033; TAA
VVEPYNSIL

SEQ ID NO: 96659 - protein, 9 aa, Homo sapiens
  Table A; Target 96659; HLA-C*03:04; TUBA3C; ENSG00000198033; TAA
VVEPYNSIL

SEQ ID NO: 96660 - protein, 9 aa, Homo sapiens
  Table A; Target 96660; HLA-C*04:01; TUBA3C; ENSG00000198033; TAA
VVEPYNSIL

SEQ ID NO: 96661 - protein, 9 aa, Homo sapiens
  Table A; Target 96661; HLA-C*05:01; TUBA3C; ENSG00000198033; TAA
VVEPYNSIL

SEQ ID NO: 96662 - protein, 9 aa, Homo sapiens
  Table A; Target 96662; HLA-C*06:02; TUBA3C; ENSG00000198033; TAA
VVEPYNSIL

SEQ ID NO: 96663 - protein, 9 aa, Homo sapiens
  Table A; Target 96663; HLA-C*07:01; TUBA3C; ENSG00000198033; TAA
VVEPYNSIL

SEQ ID NO: 96664 - protein, 9 aa, Homo sapiens
  Table A; Target 96664; HLA-C*07:04; TUBA3C; ENSG00000198033; TAA
VVEPYNSIL

SEQ ID NO: 96665 - protein, 9 aa, Homo sapiens
  Table A; Target 96665; HLA-C*12:03; TUBA3C; ENSG00000198033; TAA
VVEPYNSIL

SEQ ID NO: 96666 - protein, 9 aa, Homo sapiens
  Table A; Target 96666; HLA-C*16:02; TUBA3C; ENSG00000198033; TAA
VVEPYNSIL

SEQ ID NO: 96667 - protein, 10 aa, Homo sapiens
  Table A; Target 96667; HLA-A*01:01; TUBA3C; ENSG00000198033; TAA
VVEPYNSILT

SEQ ID NO: 96668 - protein, 10 aa, Homo sapiens
  Table A; Target 96668; HLA-C*06:02; TUBA3C; ENSG00000198033; TAA
VVEPYNSILT

SEQ ID NO: 96669 - protein, 10 aa, Homo sapiens
  Table A; Target 96669; HLA-C*07:01; TUBA3C; ENSG00000198033; TAA
VVEPYNSILT

SEQ ID NO: 96670 - protein, 11 aa, Homo sapiens
  Table A; Target 96670; HLA-C*04:01; TUBA3C; ENSG00000198033; TAA
VVEPYNSILTT

SEQ ID NO: 96671 - protein, 11 aa, Homo sapiens
  Table A; Target 96671; HLA-C*06:02; TUBA3C; ENSG00000198033; TAA
VVEPYNSILTT

SEQ ID NO: 96672 - protein, 11 aa, Homo sapiens
  Table A; Target 96672; HLA-C*07:01; TUBA3C; ENSG00000198033; TAA
VVEPYNSILTT

SEQ ID NO: 96673 - protein, 9 aa, Homo sapiens
  Table A; Target 96673; HLA-A*03:01; TUBA3C; ENSG00000198033; TAA
VVPGGDLAK

SEQ ID NO: 96674 - protein, 9 aa, Homo sapiens
  Table A; Target 96674; HLA-A*03:02; TUBA3C; ENSG00000198033; TAA
VVPGGDLAK

SEQ ID NO: 96675 - protein, 9 aa, Homo sapiens
  Table A; Target 96675; HLA-A*11:01; TUBA3C; ENSG00000198033; TAA
VVPGGDLAK

SEQ ID NO: 96676 - protein, 9 aa, Homo sapiens
  Table A; Target 96676; HLA-C*01:02; TUBA3C; ENSG00000198033; TAA
VVPGGDLAK

SEQ ID NO: 96677 - protein, 10 aa, Homo sapiens
  Table A; Target 96677; HLA-A*02:01; TUBA3C; ENSG00000198033; TAA
VVPGGDLAKV

SEQ ID NO: 96678 - protein, 10 aa, Homo sapiens
  Table A; Target 96678; HLA-A*02:03; TUBA3C; ENSG00000198033; TAA
VVPGGDLAKV

SEQ ID NO: 96679 - protein, 10 aa, Homo sapiens
  Table A; Target 96679; HLA-A*02:07; TUBA3C; ENSG00000198033; TAA
VVPGGDLAKV

SEQ ID NO: 96680 - protein, 10 aa, Homo sapiens
  Table A; Target 96680; HLA-A*25:01; TUBA3C; ENSG00000198033; TAA
VVPGGDLAKV

SEQ ID NO: 96681 - protein, 10 aa, Homo sapiens
  Table A; Target 96681; HLA-A*26:01; TUBA3C; ENSG00000198033; TAA
VVPGGDLAKV

SEQ ID NO: 96682 - protein, 10 aa, Homo sapiens
  Table A; Target 96682; HLA-A*68:02; TUBA3C; ENSG00000198033; TAA
VVPGGDLAKV

SEQ ID NO: 96683 - protein, 8 aa, Homo sapiens
  Table A; Target 96683; HLA-C*06:02; TUBA3C; ENSG00000198033; TAA
VVPKDVNA

SEQ ID NO: 96684 - protein, 9 aa, Homo sapiens
  Table A; Target 96684; HLA-A*02:03; TUBA3C; ENSG00000198033; TAA
VVPKDVNAA

SEQ ID NO: 96685 - protein, 9 aa, Homo sapiens
  Table A; Target 96685; HLA-A*02:07; TUBA3C; ENSG00000198033; TAA
VVPKDVNAA

SEQ ID NO: 96686 - protein, 9 aa, Homo sapiens
  Table A; Target 96686; HLA-B*55:01; TUBA3C; ENSG00000198033; TAA
VVPKDVNAA

SEQ ID NO: 96687 - protein, 9 aa, Homo sapiens
  Table A; Target 96687; HLA-C*01:02; TUBA3C; ENSG00000198033; TAA
VVPKDVNAA

SEQ ID NO: 96688 - protein, 10 aa, Homo sapiens
  Table A; Target 96688; HLA-A*02:07; TUBA3C; ENSG00000198033; TAA
VVPKDVNAAI

SEQ ID NO: 96689 - protein, 10 aa, Homo sapiens
  Table A; Target 96689; HLA-A*25:01; TUBA3C; ENSG00000198033; TAA
VVPKDVNAAI

SEQ ID NO: 96690 - protein, 10 aa, Homo sapiens
  Table A; Target 96690; HLA-A*68:02; TUBA3C; ENSG00000198033; TAA
VVPKDVNAAI

SEQ ID NO: 96691 - protein, 10 aa, Homo sapiens
  Table A; Target 96691; HLA-B*07:02; TUBA3C; ENSG00000198033; TAA
VVPKDVNAAI

SEQ ID NO: 96692 - protein, 10 aa, Homo sapiens
  Table A; Target 96692; HLA-B*13:02; TUBA3C; ENSG00000198033; TAA
VVPKDVNAAI

SEQ ID NO: 96693 - protein, 10 aa, Homo sapiens
  Table A; Target 96693; HLA-B*58:01; TUBA3C; ENSG00000198033; TAA
VVPKDVNAAI

SEQ ID NO: 96694 - protein, 10 aa, Homo sapiens
  Table A; Target 96694; HLA-C*01:02; TUBA3C; ENSG00000198033; TAA
VVPKDVNAAI

SEQ ID NO: 96695 - protein, 10 aa, Homo sapiens
  Table A; Target 96695; HLA-C*06:02; TUBA3C; ENSG00000198033; TAA
VVPKDVNAAI

SEQ ID NO: 96696 - protein, 10 aa, Homo sapiens
  Table A; Target 96696; HLA-C*07:02; TUBA3C; ENSG00000198033; TAA
VVPKDVNAAI

SEQ ID NO: 96697 - protein, 11 aa, Homo sapiens
  Table A; Target 96697; HLA-A*02:07; TUBA3C; ENSG00000198033; TAA
VVPKDVNAAIA

SEQ ID NO: 96698 - protein, 9 aa, Homo sapiens
  Table A; Target 96698; HLA-A*24:02; TUBA3C; ENSG00000198033; TAA
YAKRAFVHW

SEQ ID NO: 96699 - protein, 9 aa, Homo sapiens
  Table A; Target 96699; HLA-A*31:01; TUBA3C; ENSG00000198033; TAA
YAKRAFVHW

SEQ ID NO: 96700 - protein, 9 aa, Homo sapiens
  Table A; Target 96700; HLA-A*33:01; TUBA3C; ENSG00000198033; TAA
YAKRAFVHW

SEQ ID NO: 96701 - protein, 9 aa, Homo sapiens
  Table A; Target 96701; HLA-B*57:01; TUBA3C; ENSG00000198033; TAA
YAKRAFVHW

SEQ ID NO: 96702 - protein, 9 aa, Homo sapiens
  Table A; Target 96702; HLA-C*02:02; TUBA3C; ENSG00000198033; TAA
YAKRAFVHW

SEQ ID NO: 96703 - protein, 8 aa, Homo sapiens
  Table A; Target 96703; HLA-C*07:01; TUBA3C; ENSG00000198033; TAA
YAPVISAE

SEQ ID NO: 96704 - protein, 8 aa, Homo sapiens
  Table A; Target 96704; HLA-C*12:03; TUBA3C; ENSG00000198033; TAA
YAPVISAE

SEQ ID NO: 96705 - protein, 9 aa, Homo sapiens
  Table A; Target 96705; HLA-A*01:01; TUBA3C; ENSG00000198033; TAA
YAPVISAEK

SEQ ID NO: 96706 - protein, 9 aa, Homo sapiens
  Table A; Target 96706; HLA-A*02:07; TUBA3C; ENSG00000198033; TAA
YAPVISAEK

SEQ ID NO: 96707 - protein, 9 aa, Homo sapiens
  Table A; Target 96707; HLA-A*03:01; TUBA3C; ENSG00000198033; TAA
YAPVISAEK

SEQ ID NO: 96708 - protein, 9 aa, Homo sapiens
  Table A; Target 96708; HLA-A*03:02; TUBA3C; ENSG00000198033; TAA
YAPVISAEK

SEQ ID NO: 96709 - protein, 9 aa, Homo sapiens
  Table A; Target 96709; HLA-A*11:01; TUBA3C; ENSG00000198033; TAA
YAPVISAEK

SEQ ID NO: 96710 - protein, 9 aa, Homo sapiens
  Table A; Target 96710; HLA-A*24:02; TUBA3C; ENSG00000198033; TAA
YAPVISAEK

SEQ ID NO: 96711 - protein, 9 aa, Homo sapiens
  Table A; Target 96711; HLA-A*26:01; TUBA3C; ENSG00000198033; TAA
YAPVISAEK

SEQ ID NO: 96712 - protein, 9 aa, Homo sapiens
  Table A; Target 96712; HLA-A*29:02; TUBA3C; ENSG00000198033; TAA
YAPVISAEK

SEQ ID NO: 96713 - protein, 9 aa, Homo sapiens
  Table A; Target 96713; HLA-A*31:01; TUBA3C; ENSG00000198033; TAA
YAPVISAEK

SEQ ID NO: 96714 - protein, 9 aa, Homo sapiens
  Table A; Target 96714; HLA-A*33:01; TUBA3C; ENSG00000198033; TAA
YAPVISAEK

SEQ ID NO: 96715 - protein, 9 aa, Homo sapiens
  Table A; Target 96715; HLA-A*33:03; TUBA3C; ENSG00000198033; TAA
YAPVISAEK

SEQ ID NO: 96716 - protein, 9 aa, Homo sapiens
  Table A; Target 96716; HLA-A*68:01; TUBA3C; ENSG00000198033; TAA
YAPVISAEK

SEQ ID NO: 96717 - protein, 9 aa, Homo sapiens
  Table A; Target 96717; HLA-A*68:02; TUBA3C; ENSG00000198033; TAA
YAPVISAEK

SEQ ID NO: 96718 - protein, 9 aa, Homo sapiens
  Table A; Target 96718; HLA-B*07:02; TUBA3C; ENSG00000198033; TAA
YAPVISAEK

SEQ ID NO: 96719 - protein, 9 aa, Homo sapiens
  Table A; Target 96719; HLA-B*13:02; TUBA3C; ENSG00000198033; TAA
YAPVISAEK

SEQ ID NO: 96720 - protein, 9 aa, Homo sapiens
  Table A; Target 96720; HLA-B*27:02; TUBA3C; ENSG00000198033; TAA
YAPVISAEK

SEQ ID NO: 96721 - protein, 9 aa, Homo sapiens
  Table A; Target 96721; HLA-B*27:05; TUBA3C; ENSG00000198033; TAA
YAPVISAEK

SEQ ID NO: 96722 - protein, 9 aa, Homo sapiens
  Table A; Target 96722; HLA-B*35:01; TUBA3C; ENSG00000198033; TAA
YAPVISAEK

SEQ ID NO: 96723 - protein, 9 aa, Homo sapiens
  Table A; Target 96723; HLA-B*35:03; TUBA3C; ENSG00000198033; TAA
YAPVISAEK

SEQ ID NO: 96724 - protein, 9 aa, Homo sapiens
  Table A; Target 96724; HLA-B*46:01; TUBA3C; ENSG00000198033; TAA
YAPVISAEK

SEQ ID NO: 96725 - protein, 9 aa, Homo sapiens
  Table A; Target 96725; HLA-B*51:01; TUBA3C; ENSG00000198033; TAA
YAPVISAEK

SEQ ID NO: 96726 - protein, 9 aa, Homo sapiens
  Table A; Target 96726; HLA-B*54:01; TUBA3C; ENSG00000198033; TAA
YAPVISAEK

SEQ ID NO: 96727 - protein, 9 aa, Homo sapiens
  Table A; Target 96727; HLA-B*57:01; TUBA3C; ENSG00000198033; TAA
YAPVISAEK

SEQ ID NO: 96728 - protein, 9 aa, Homo sapiens
  Table A; Target 96728; HLA-C*01:02; TUBA3C; ENSG00000198033; TAA
YAPVISAEK

SEQ ID NO: 96729 - protein, 9 aa, Homo sapiens
  Table A; Target 96729; HLA-C*02:02; TUBA3C; ENSG00000198033; TAA
YAPVISAEK

SEQ ID NO: 96730 - protein, 9 aa, Homo sapiens
  Table A; Target 96730; HLA-C*03:03; TUBA3C; ENSG00000198033; TAA
YAPVISAEK

SEQ ID NO: 96731 - protein, 9 aa, Homo sapiens
  Table A; Target 96731; HLA-C*03:04; TUBA3C; ENSG00000198033; TAA
YAPVISAEK

SEQ ID NO: 96732 - protein, 9 aa, Homo sapiens
  Table A; Target 96732; HLA-C*04:01; TUBA3C; ENSG00000198033; TAA
YAPVISAEK

SEQ ID NO: 96733 - protein, 9 aa, Homo sapiens
  Table A; Target 96733; HLA-C*05:01; TUBA3C; ENSG00000198033; TAA
YAPVISAEK

SEQ ID NO: 96734 - protein, 9 aa, Homo sapiens
  Table A; Target 96734; HLA-C*06:02; TUBA3C; ENSG00000198033; TAA
YAPVISAEK

SEQ ID NO: 96735 - protein, 9 aa, Homo sapiens
  Table A; Target 96735; HLA-C*07:01; TUBA3C; ENSG00000198033; TAA
YAPVISAEK

SEQ ID NO: 96736 - protein, 9 aa, Homo sapiens
  Table A; Target 96736; HLA-C*07:02; TUBA3C; ENSG00000198033; TAA
YAPVISAEK

SEQ ID NO: 96737 - protein, 9 aa, Homo sapiens
  Table A; Target 96737; HLA-C*07:04; TUBA3C; ENSG00000198033; TAA
YAPVISAEK

SEQ ID NO: 96738 - protein, 9 aa, Homo sapiens
  Table A; Target 96738; HLA-C*07:06; TUBA3C; ENSG00000198033; TAA
YAPVISAEK

SEQ ID NO: 96739 - protein, 9 aa, Homo sapiens
  Table A; Target 96739; HLA-C*12:03; TUBA3C; ENSG00000198033; TAA
YAPVISAEK

SEQ ID NO: 96740 - protein, 9 aa, Homo sapiens
  Table A; Target 96740; HLA-C*16:01; TUBA3C; ENSG00000198033; TAA
YAPVISAEK

SEQ ID NO: 96741 - protein, 9 aa, Homo sapiens
  Table A; Target 96741; HLA-C*16:04; TUBA3C; ENSG00000198033; TAA
YAPVISAEK

SEQ ID NO: 96742 - protein, 10 aa, Homo sapiens
  Table A; Target 96742; HLA-A*02:07; TUBA3C; ENSG00000198033; TAA
YAPVISAEKA

SEQ ID NO: 96743 - protein, 10 aa, Homo sapiens
  Table A; Target 96743; HLA-B*54:01; TUBA3C; ENSG00000198033; TAA
YAPVISAEKA

SEQ ID NO: 96744 - protein, 11 aa, Homo sapiens
  Table A; Target 96744; HLA-A*01:01; TUBA3C; ENSG00000198033; TAA
YAPVISAEKAY

SEQ ID NO: 96745 - protein, 11 aa, Homo sapiens
  Table A; Target 96745; HLA-A*25:01; TUBA3C; ENSG00000198033; TAA
YAPVISAEKAY

SEQ ID NO: 96746 - protein, 11 aa, Homo sapiens
  Table A; Target 96746; HLA-A*26:01; TUBA3C; ENSG00000198033; TAA
YAPVISAEKAY

SEQ ID NO: 96747 - protein, 11 aa, Homo sapiens
  Table A; Target 96747; HLA-A*29:02; TUBA3C; ENSG00000198033; TAA
YAPVISAEKAY

SEQ ID NO: 96748 - protein, 11 aa, Homo sapiens
  Table A; Target 96748; HLA-A*30:02; TUBA3C; ENSG00000198033; TAA
YAPVISAEKAY

SEQ ID NO: 96749 - protein, 11 aa, Homo sapiens
  Table A; Target 96749; HLA-B*15:01; TUBA3C; ENSG00000198033; TAA
YAPVISAEKAY

SEQ ID NO: 96750 - protein, 11 aa, Homo sapiens
  Table A; Target 96750; HLA-B*15:03; TUBA3C; ENSG00000198033; TAA
YAPVISAEKAY

SEQ ID NO: 96751 - protein, 11 aa, Homo sapiens
  Table A; Target 96751; HLA-B*35:01; TUBA3C; ENSG00000198033; TAA
YAPVISAEKAY

SEQ ID NO: 96752 - protein, 11 aa, Homo sapiens
  Table A; Target 96752; HLA-B*46:01; TUBA3C; ENSG00000198033; TAA
YAPVISAEKAY

SEQ ID NO: 96753 - protein, 11 aa, Homo sapiens
  Table A; Target 96753; HLA-C*01:02; TUBA3C; ENSG00000198033; TAA
YAPVISAEKAY

SEQ ID NO: 96754 - protein, 11 aa, Homo sapiens
  Table A; Target 96754; HLA-C*02:02; TUBA3C; ENSG00000198033; TAA
YAPVISAEKAY

SEQ ID NO: 96755 - protein, 11 aa, Homo sapiens
  Table A; Target 96755; HLA-C*03:03; TUBA3C; ENSG00000198033; TAA
YAPVISAEKAY

SEQ ID NO: 96756 - protein, 11 aa, Homo sapiens
  Table A; Target 96756; HLA-C*04:01; TUBA3C; ENSG00000198033; TAA
YAPVISAEKAY

SEQ ID NO: 96757 - protein, 11 aa, Homo sapiens
  Table A; Target 96757; HLA-C*07:01; TUBA3C; ENSG00000198033; TAA
YAPVISAEKAY

SEQ ID NO: 96758 - protein, 11 aa, Homo sapiens
  Table A; Target 96758; HLA-C*16:01; TUBA3C; ENSG00000198033; TAA
YAPVISAEKAY

SEQ ID NO: 96759 - protein, 11 aa, Homo sapiens
  Table A; Target 96759; HLA-C*16:02; TUBA3C; ENSG00000198033; TAA
YAPVISAEKAY

SEQ ID NO: 96760 - protein, 11 aa, Homo sapiens
  Table A; Target 96760; HLA-C*16:04; TUBA3C; ENSG00000198033; TAA
YAPVISAEKAY

SEQ ID NO: 96761 - protein, 8 aa, Homo sapiens
  Table A; Target 96761; HLA-A*23:01; TUBA3C; ENSG00000198033; TAA
YARGHYTI

SEQ ID NO: 96762 - protein, 8 aa, Homo sapiens
  Table A; Target 96762; HLA-B*08:01; TUBA3C; ENSG00000198033; TAA
YARGHYTI

SEQ ID NO: 96763 - protein, 8 aa, Homo sapiens
  Table A; Target 96763; HLA-B*40:02; TUBA3C; ENSG00000198033; TAA
YARGHYTI

SEQ ID NO: 96764 - protein, 8 aa, Homo sapiens
  Table A; Target 96764; HLA-B*51:01; TUBA3C; ENSG00000198033; TAA
YARGHYTI

SEQ ID NO: 96765 - protein, 8 aa, Homo sapiens
  Table A; Target 96765; HLA-B*54:01; TUBA3C; ENSG00000198033; TAA
YARGHYTI

SEQ ID NO: 96766 - protein, 8 aa, Homo sapiens
  Table A; Target 96766; HLA-B*57:01; TUBA3C; ENSG00000198033; TAA
YARGHYTI

SEQ ID NO: 96767 - protein, 8 aa, Homo sapiens
  Table A; Target 96767; HLA-C*06:02; TUBA3C; ENSG00000198033; TAA
YARGHYTI

SEQ ID NO: 96768 - protein, 8 aa, Homo sapiens
  Table A; Target 96768; HLA-C*07:01; TUBA3C; ENSG00000198033; TAA
YARGHYTI

SEQ ID NO: 96769 - protein, 8 aa, Homo sapiens
  Table A; Target 96769; HLA-C*07:02; TUBA3C; ENSG00000198033; TAA
YARGHYTI

SEQ ID NO: 96770 - protein, 10 aa, Homo sapiens
  Table A; Target 96770; HLA-A*03:01; TUBA3C; ENSG00000198033; TAA
YARGHYTIGK

SEQ ID NO: 96771 - protein, 10 aa, Homo sapiens
  Table A; Target 96771; HLA-A*31:01; TUBA3C; ENSG00000198033; TAA
YARGHYTIGK

SEQ ID NO: 96772 - protein, 9 aa, Homo sapiens
  Table A; Target 96772; HLA-A*30:01; TUBA3C; ENSG00000198033; TAA
YEEVGVDSV

SEQ ID NO: 96773 - protein, 9 aa, Homo sapiens
  Table A; Target 96773; HLA-A*68:02; TUBA3C; ENSG00000198033; TAA
YEEVGVDSV

SEQ ID NO: 96774 - protein, 9 aa, Homo sapiens
  Table A; Target 96774; HLA-B*13:02; TUBA3C; ENSG00000198033; TAA
YEEVGVDSV

SEQ ID NO: 96775 - protein, 9 aa, Homo sapiens
  Table A; Target 96775; HLA-B*18:01; TUBA3C; ENSG00000198033; TAA
YEEVGVDSV

SEQ ID NO: 96776 - protein, 9 aa, Homo sapiens
  Table A; Target 96776; HLA-B*27:05; TUBA3C; ENSG00000198033; TAA
YEEVGVDSV

SEQ ID NO: 96777 - protein, 9 aa, Homo sapiens
  Table A; Target 96777; HLA-B*37:01; TUBA3C; ENSG00000198033; TAA
YEEVGVDSV

SEQ ID NO: 96778 - protein, 9 aa, Homo sapiens
  Table A; Target 96778; HLA-B*38:01; TUBA3C; ENSG00000198033; TAA
YEEVGVDSV

SEQ ID NO: 96779 - protein, 9 aa, Homo sapiens
  Table A; Target 96779; HLA-B*39:01; TUBA3C; ENSG00000198033; TAA
YEEVGVDSV

SEQ ID NO: 96780 - protein, 9 aa, Homo sapiens
  Table A; Target 96780; HLA-B*40:01; TUBA3C; ENSG00000198033; TAA
YEEVGVDSV

SEQ ID NO: 96781 - protein, 9 aa, Homo sapiens
  Table A; Target 96781; HLA-B*40:02; TUBA3C; ENSG00000198033; TAA
YEEVGVDSV

SEQ ID NO: 96782 - protein, 9 aa, Homo sapiens
  Table A; Target 96782; HLA-B*49:01; TUBA3C; ENSG00000198033; TAA
YEEVGVDSV

SEQ ID NO: 96783 - protein, 9 aa, Homo sapiens
  Table A; Target 96783; HLA-B*55:01; TUBA3C; ENSG00000198033; TAA
YEEVGVDSV

SEQ ID NO: 96784 - protein, 9 aa, Homo sapiens
  Table A; Target 96784; HLA-C*03:03; TUBA3C; ENSG00000198033; TAA
YEEVGVDSV

SEQ ID NO: 96785 - protein, 9 aa, Homo sapiens
  Table A; Target 96785; HLA-C*04:01; TUBA3C; ENSG00000198033; TAA
YEEVGVDSV

SEQ ID NO: 96786 - protein, 9 aa, Homo sapiens
  Table A; Target 96786; HLA-C*05:01; TUBA3C; ENSG00000198033; TAA
YEEVGVDSV

SEQ ID NO: 96787 - protein, 9 aa, Homo sapiens
  Table A; Target 96787; HLA-C*07:04; TUBA3C; ENSG00000198033; TAA
YEEVGVDSV

SEQ ID NO: 96788 - protein, 9 aa, Homo sapiens
  Table A; Target 96788; HLA-C*12:03; TUBA3C; ENSG00000198033; TAA
YEEVGVDSV

SEQ ID NO: 96789 - protein, 9 aa, Homo sapiens
  Table A; Target 96789; HLA-C*16:02; TUBA3C; ENSG00000198033; TAA
YEEVGVDSV

SEQ ID NO: 96790 - protein, 11 aa, Homo sapiens
  Table A; Target 96790; HLA-B*18:01; TUBA3C; ENSG00000198033; TAA
YEEVGVDSVEA

SEQ ID NO: 96791 - protein, 11 aa, Homo sapiens
  Table A; Target 96791; HLA-B*27:05; TUBA3C; ENSG00000198033; TAA
YEEVGVDSVEA

SEQ ID NO: 96792 - protein, 11 aa, Homo sapiens
  Table A; Target 96792; HLA-B*39:01; TUBA3C; ENSG00000198033; TAA
YEEVGVDSVEA

SEQ ID NO: 96793 - protein, 11 aa, Homo sapiens
  Table A; Target 96793; HLA-B*40:01; TUBA3C; ENSG00000198033; TAA
YEEVGVDSVEA

SEQ ID NO: 96794 - protein, 11 aa, Homo sapiens
  Table A; Target 96794; HLA-B*40:02; TUBA3C; ENSG00000198033; TAA
YEEVGVDSVEA

SEQ ID NO: 96795 - protein, 11 aa, Homo sapiens
  Table A; Target 96795; HLA-C*07:04; TUBA3C; ENSG00000198033; TAA
YEEVGVDSVEA

SEQ ID NO: 96796 - protein, 11 aa, Homo sapiens
  Table A; Target 96796; HLA-C*12:03; TUBA3C; ENSG00000198033; TAA
YEEVGVDSVEA

SEQ ID NO: 96797 - protein, 9 aa, Homo sapiens
  Table A; Target 96797; HLA-B*08:01; TUBA3C; ENSG00000198033; TAA
YGKKSKLEF

SEQ ID NO: 96798 - protein, 9 aa, Homo sapiens
  Table A; Target 96798; HLA-C*07:01; TUBA3C; ENSG00000198033; TAA
YGKKSKLEF

SEQ ID NO: 96799 - protein, 8 aa, Homo sapiens
  Table A; Target 96799; HLA-B*39:01; TUBA3C; ENSG00000198033; TAA
YHEQLSVA

SEQ ID NO: 96800 - protein, 10 aa, Homo sapiens
  Table A; Target 96800; HLA-B*27:05; TUBA3C; ENSG00000198033; TAA
YHEQLSVAEI

SEQ ID NO: 96801 - protein, 10 aa, Homo sapiens
  Table A; Target 96801; HLA-B*38:01; TUBA3C; ENSG00000198033; TAA
YHEQLSVAEI

SEQ ID NO: 96802 - protein, 10 aa, Homo sapiens
  Table A; Target 96802; HLA-B*39:01; TUBA3C; ENSG00000198033; TAA
YHEQLSVAEI

SEQ ID NO: 96803 - protein, 10 aa, Homo sapiens
  Table A; Target 96803; HLA-C*04:01; TUBA3C; ENSG00000198033; TAA
YHEQLSVAEI

SEQ ID NO: 96804 - protein, 10 aa, Homo sapiens
  Table A; Target 96804; HLA-C*07:01; TUBA3C; ENSG00000198033; TAA
YHEQLSVAEI

SEQ ID NO: 96805 - protein, 10 aa, Homo sapiens
  Table A; Target 96805; HLA-C*07:04; TUBA3C; ENSG00000198033; TAA
YHEQLSVAEI

SEQ ID NO: 96806 - protein, 8 aa, Homo sapiens
  Table A; Target 96806; HLA-C*07:01; TUBA3C; ENSG00000198033; TAA
YMACCMLY

SEQ ID NO: 96807 - protein, 8 aa, Homo sapiens
  Table A; Target 96807; HLA-C*07:01; TUBA3C; ENSG00000198033; TAA
YNSILTTH

SEQ ID NO: 96808 - protein, 9 aa, Homo sapiens
  Table A; Target 96808; HLA-C*04:01; TUBA3C; ENSG00000198033; TAA
YNSILTTHT

SEQ ID NO: 96809 - protein, 9 aa, Homo sapiens
  Table A; Target 96809; HLA-C*06:02; TUBA3C; ENSG00000198033; TAA
YNSILTTHT

SEQ ID NO: 96810 - protein, 9 aa, Homo sapiens
  Table A; Target 96810; HLA-C*07:01; TUBA3C; ENSG00000198033; TAA
YNSILTTHT

SEQ ID NO: 96811 - protein, 10 aa, Homo sapiens
  Table A; Target 96811; HLA-C*04:01; TUBA3C; ENSG00000198033; TAA
YNSILTTHTT

SEQ ID NO: 96812 - protein, 11 aa, Homo sapiens
  Table A; Target 96812; HLA-B*40:02; TUBA3C; ENSG00000198033; TAA
YNSILTTHTTL

SEQ ID NO: 96813 - protein, 11 aa, Homo sapiens
  Table A; Target 96813; HLA-C*06:02; TUBA3C; ENSG00000198033; TAA
YNSILTTHTTL

SEQ ID NO: 96814 - protein, 11 aa, Homo sapiens
  Table A; Target 96814; HLA-C*07:01; TUBA3C; ENSG00000198033; TAA
YNSILTTHTTL

SEQ ID NO: 96815 - protein, 8 aa, Homo sapiens
  Table A; Target 96815; HLA-B*35:01; TUBA3C; ENSG00000198033; TAA
YPAPQVST

SEQ ID NO: 96816 - protein, 8 aa, Homo sapiens
  Table A; Target 96816; HLA-B*35:03; TUBA3C; ENSG00000198033; TAA
YPAPQVST

SEQ ID NO: 96817 - protein, 8 aa, Homo sapiens
  Table A; Target 96817; HLA-B*51:01; TUBA3C; ENSG00000198033; TAA
YPAPQVST

SEQ ID NO: 96818 - protein, 8 aa, Homo sapiens
  Table A; Target 96818; HLA-B*54:01; TUBA3C; ENSG00000198033; TAA
YPAPQVST

SEQ ID NO: 96819 - protein, 8 aa, Homo sapiens
  Table A; Target 96819; HLA-B*55:01; TUBA3C; ENSG00000198033; TAA
YPAPQVST

SEQ ID NO: 96820 - protein, 8 aa, Homo sapiens
  Table A; Target 96820; HLA-B*56:01; TUBA3C; ENSG00000198033; TAA
YPAPQVST

SEQ ID NO: 96821 - protein, 8 aa, Homo sapiens
  Table A; Target 96821; HLA-C*04:01; TUBA3C; ENSG00000198033; TAA
YPAPQVST

SEQ ID NO: 96822 - protein, 8 aa, Homo sapiens
  Table A; Target 96822; HLA-C*07:02; TUBA3C; ENSG00000198033; TAA
YPAPQVST

SEQ ID NO: 96823 - protein, 8 aa, Homo sapiens
  Table A; Target 96823; HLA-C*16:02; TUBA3C; ENSG00000198033; TAA
YPAPQVST

SEQ ID NO: 96824 - protein, 9 aa, Homo sapiens
  Table A; Target 96824; HLA-A*02:01; TUBA3C; ENSG00000198033; TAA
YPAPQVSTA

SEQ ID NO: 96825 - protein, 9 aa, Homo sapiens
  Table A; Target 96825; HLA-A*02:03; TUBA3C; ENSG00000198033; TAA
YPAPQVSTA

SEQ ID NO: 96826 - protein, 9 aa, Homo sapiens
  Table A; Target 96826; HLA-A*02:04; TUBA3C; ENSG00000198033; TAA
YPAPQVSTA

SEQ ID NO: 96827 - protein, 9 aa, Homo sapiens
  Table A; Target 96827; HLA-A*02:07; TUBA3C; ENSG00000198033; TAA
YPAPQVSTA

SEQ ID NO: 96828 - protein, 9 aa, Homo sapiens
  Table A; Target 96828; HLA-A*23:01; TUBA3C; ENSG00000198033; TAA
YPAPQVSTA

SEQ ID NO: 96829 - protein, 9 aa, Homo sapiens
  Table A; Target 96829; HLA-A*24:02; TUBA3C; ENSG00000198033; TAA
YPAPQVSTA

SEQ ID NO: 96830 - protein, 9 aa, Homo sapiens
  Table A; Target 96830; HLA-A*25:01; TUBA3C; ENSG00000198033; TAA
YPAPQVSTA

SEQ ID NO: 96831 - protein, 9 aa, Homo sapiens
  Table A; Target 96831; HLA-A*26:01; TUBA3C; ENSG00000198033; TAA
YPAPQVSTA

SEQ ID NO: 96832 - protein, 9 aa, Homo sapiens
  Table A; Target 96832; HLA-A*30:01; TUBA3C; ENSG00000198033; TAA
YPAPQVSTA

SEQ ID NO: 96833 - protein, 9 aa, Homo sapiens
  Table A; Target 96833; HLA-A*32:01; TUBA3C; ENSG00000198033; TAA
YPAPQVSTA

SEQ ID NO: 96834 - protein, 9 aa, Homo sapiens
  Table A; Target 96834; HLA-A*68:01; TUBA3C; ENSG00000198033; TAA
YPAPQVSTA

SEQ ID NO: 96835 - protein, 9 aa, Homo sapiens
  Table A; Target 96835; HLA-A*68:02; TUBA3C; ENSG00000198033; TAA
YPAPQVSTA

SEQ ID NO: 96836 - protein, 9 aa, Homo sapiens
  Table A; Target 96836; HLA-B*07:02; TUBA3C; ENSG00000198033; TAA
YPAPQVSTA

SEQ ID NO: 96837 - protein, 9 aa, Homo sapiens
  Table A; Target 96837; HLA-B*08:01; TUBA3C; ENSG00000198033; TAA
YPAPQVSTA

SEQ ID NO: 96838 - protein, 9 aa, Homo sapiens
  Table A; Target 96838; HLA-B*13:02; TUBA3C; ENSG00000198033; TAA
YPAPQVSTA

SEQ ID NO: 96839 - protein, 9 aa, Homo sapiens
  Table A; Target 96839; HLA-B*15:01; TUBA3C; ENSG00000198033; TAA
YPAPQVSTA

SEQ ID NO: 96840 - protein, 9 aa, Homo sapiens
  Table A; Target 96840; HLA-B*15:03; TUBA3C; ENSG00000198033; TAA
YPAPQVSTA

SEQ ID NO: 96841 - protein, 9 aa, Homo sapiens
  Table A; Target 96841; HLA-B*18:01; TUBA3C; ENSG00000198033; TAA
YPAPQVSTA

SEQ ID NO: 96842 - protein, 9 aa, Homo sapiens
  Table A; Target 96842; HLA-B*27:05; TUBA3C; ENSG00000198033; TAA
YPAPQVSTA

SEQ ID NO: 96843 - protein, 9 aa, Homo sapiens
  Table A; Target 96843; HLA-B*35:01; TUBA3C; ENSG00000198033; TAA
YPAPQVSTA

SEQ ID NO: 96844 - protein, 9 aa, Homo sapiens
  Table A; Target 96844; HLA-B*35:03; TUBA3C; ENSG00000198033; TAA
YPAPQVSTA

SEQ ID NO: 96845 - protein, 9 aa, Homo sapiens
  Table A; Target 96845; HLA-B*37:01; TUBA3C; ENSG00000198033; TAA
YPAPQVSTA

SEQ ID NO: 96846 - protein, 9 aa, Homo sapiens
  Table A; Target 96846; HLA-B*38:01; TUBA3C; ENSG00000198033; TAA
YPAPQVSTA

SEQ ID NO: 96847 - protein, 9 aa, Homo sapiens
  Table A; Target 96847; HLA-B*39:01; TUBA3C; ENSG00000198033; TAA
YPAPQVSTA

SEQ ID NO: 96848 - protein, 9 aa, Homo sapiens
  Table A; Target 96848; HLA-B*40:02; TUBA3C; ENSG00000198033; TAA
YPAPQVSTA

SEQ ID NO: 96849 - protein, 9 aa, Homo sapiens
  Table A; Target 96849; HLA-B*46:01; TUBA3C; ENSG00000198033; TAA
YPAPQVSTA

SEQ ID NO: 96850 - protein, 9 aa, Homo sapiens
  Table A; Target 96850; HLA-B*49:01; TUBA3C; ENSG00000198033; TAA
YPAPQVSTA

SEQ ID NO: 96851 - protein, 9 aa, Homo sapiens
  Table A; Target 96851; HLA-B*51:01; TUBA3C; ENSG00000198033; TAA
YPAPQVSTA

SEQ ID NO: 96852 - protein, 9 aa, Homo sapiens
  Table A; Target 96852; HLA-B*54:01; TUBA3C; ENSG00000198033; TAA
YPAPQVSTA

SEQ ID NO: 96853 - protein, 9 aa, Homo sapiens
  Table A; Target 96853; HLA-B*55:01; TUBA3C; ENSG00000198033; TAA
YPAPQVSTA

SEQ ID NO: 96854 - protein, 9 aa, Homo sapiens
  Table A; Target 96854; HLA-B*56:01; TUBA3C; ENSG00000198033; TAA
YPAPQVSTA

SEQ ID NO: 96855 - protein, 9 aa, Homo sapiens
  Table A; Target 96855; HLA-B*58:01; TUBA3C; ENSG00000198033; TAA
YPAPQVSTA

SEQ ID NO: 96856 - protein, 9 aa, Homo sapiens
  Table A; Target 96856; HLA-C*01:02; TUBA3C; ENSG00000198033; TAA
YPAPQVSTA

SEQ ID NO: 96857 - protein, 9 aa, Homo sapiens
  Table A; Target 96857; HLA-C*02:02; TUBA3C; ENSG00000198033; TAA
YPAPQVSTA

SEQ ID NO: 96858 - protein, 9 aa, Homo sapiens
  Table A; Target 96858; HLA-C*03:03; TUBA3C; ENSG00000198033; TAA
YPAPQVSTA

SEQ ID NO: 96859 - protein, 9 aa, Homo sapiens
  Table A; Target 96859; HLA-C*03:04; TUBA3C; ENSG00000198033; TAA
YPAPQVSTA

SEQ ID NO: 96860 - protein, 9 aa, Homo sapiens
  Table A; Target 96860; HLA-C*04:01; TUBA3C; ENSG00000198033; TAA
YPAPQVSTA

SEQ ID NO: 96861 - protein, 9 aa, Homo sapiens
  Table A; Target 96861; HLA-C*05:01; TUBA3C; ENSG00000198033; TAA
YPAPQVSTA

SEQ ID NO: 96862 - protein, 9 aa, Homo sapiens
  Table A; Target 96862; HLA-C*06:02; TUBA3C; ENSG00000198033; TAA
YPAPQVSTA

SEQ ID NO: 96863 - protein, 9 aa, Homo sapiens
  Table A; Target 96863; HLA-C*07:01; TUBA3C; ENSG00000198033; TAA
YPAPQVSTA

SEQ ID NO: 96864 - protein, 9 aa, Homo sapiens
  Table A; Target 96864; HLA-C*07:02; TUBA3C; ENSG00000198033; TAA
YPAPQVSTA

SEQ ID NO: 96865 - protein, 9 aa, Homo sapiens
  Table A; Target 96865; HLA-C*07:04; TUBA3C; ENSG00000198033; TAA
YPAPQVSTA

SEQ ID NO: 96866 - protein, 9 aa, Homo sapiens
  Table A; Target 96866; HLA-C*07:06; TUBA3C; ENSG00000198033; TAA
YPAPQVSTA

SEQ ID NO: 96867 - protein, 9 aa, Homo sapiens
  Table A; Target 96867; HLA-C*12:03; TUBA3C; ENSG00000198033; TAA
YPAPQVSTA

SEQ ID NO: 96868 - protein, 9 aa, Homo sapiens
  Table A; Target 96868; HLA-C*14:02; TUBA3C; ENSG00000198033; TAA
YPAPQVSTA

SEQ ID NO: 96869 - protein, 9 aa, Homo sapiens
  Table A; Target 96869; HLA-C*16:01; TUBA3C; ENSG00000198033; TAA
YPAPQVSTA

SEQ ID NO: 96870 - protein, 9 aa, Homo sapiens
  Table A; Target 96870; HLA-C*16:02; TUBA3C; ENSG00000198033; TAA
YPAPQVSTA

SEQ ID NO: 96871 - protein, 9 aa, Homo sapiens
  Table A; Target 96871; HLA-C*16:04; TUBA3C; ENSG00000198033; TAA
YPAPQVSTA

SEQ ID NO: 96872 - protein, 10 aa, Homo sapiens
  Table A; Target 96872; HLA-A*02:01; TUBA3C; ENSG00000198033; TAA
YPAPQVSTAV

SEQ ID NO: 96873 - protein, 10 aa, Homo sapiens
  Table A; Target 96873; HLA-A*02:03; TUBA3C; ENSG00000198033; TAA
YPAPQVSTAV

SEQ ID NO: 96874 - protein, 10 aa, Homo sapiens
  Table A; Target 96874; HLA-A*23:01; TUBA3C; ENSG00000198033; TAA
YPAPQVSTAV

SEQ ID NO: 96875 - protein, 10 aa, Homo sapiens
  Table A; Target 96875; HLA-A*25:01; TUBA3C; ENSG00000198033; TAA
YPAPQVSTAV

SEQ ID NO: 96876 - protein, 10 aa, Homo sapiens
  Table A; Target 96876; HLA-A*26:01; TUBA3C; ENSG00000198033; TAA
YPAPQVSTAV

SEQ ID NO: 96877 - protein, 10 aa, Homo sapiens
  Table A; Target 96877; HLA-A*30:01; TUBA3C; ENSG00000198033; TAA
YPAPQVSTAV

SEQ ID NO: 96878 - protein, 10 aa, Homo sapiens
  Table A; Target 96878; HLA-A*68:01; TUBA3C; ENSG00000198033; TAA
YPAPQVSTAV

SEQ ID NO: 96879 - protein, 10 aa, Homo sapiens
  Table A; Target 96879; HLA-A*68:02; TUBA3C; ENSG00000198033; TAA
YPAPQVSTAV

SEQ ID NO: 96880 - protein, 10 aa, Homo sapiens
  Table A; Target 96880; HLA-B*07:02; TUBA3C; ENSG00000198033; TAA
YPAPQVSTAV

SEQ ID NO: 96881 - protein, 10 aa, Homo sapiens
  Table A; Target 96881; HLA-B*13:02; TUBA3C; ENSG00000198033; TAA
YPAPQVSTAV

SEQ ID NO: 96882 - protein, 10 aa, Homo sapiens
  Table A; Target 96882; HLA-B*35:01; TUBA3C; ENSG00000198033; TAA
YPAPQVSTAV

SEQ ID NO: 96883 - protein, 10 aa, Homo sapiens
  Table A; Target 96883; HLA-B*35:03; TUBA3C; ENSG00000198033; TAA
YPAPQVSTAV

SEQ ID NO: 96884 - protein, 10 aa, Homo sapiens
  Table A; Target 96884; HLA-B*38:01; TUBA3C; ENSG00000198033; TAA
YPAPQVSTAV

SEQ ID NO: 96885 - protein, 10 aa, Homo sapiens
  Table A; Target 96885; HLA-B*39:01; TUBA3C; ENSG00000198033; TAA
YPAPQVSTAV

SEQ ID NO: 96886 - protein, 10 aa, Homo sapiens
  Table A; Target 96886; HLA-B*49:01; TUBA3C; ENSG00000198033; TAA
YPAPQVSTAV

SEQ ID NO: 96887 - protein, 10 aa, Homo sapiens
  Table A; Target 96887; HLA-B*51:01; TUBA3C; ENSG00000198033; TAA
YPAPQVSTAV

SEQ ID NO: 96888 - protein, 10 aa, Homo sapiens
  Table A; Target 96888; HLA-B*54:01; TUBA3C; ENSG00000198033; TAA
YPAPQVSTAV

SEQ ID NO: 96889 - protein, 10 aa, Homo sapiens
  Table A; Target 96889; HLA-B*55:01; TUBA3C; ENSG00000198033; TAA
YPAPQVSTAV

SEQ ID NO: 96890 - protein, 10 aa, Homo sapiens
  Table A; Target 96890; HLA-B*56:01; TUBA3C; ENSG00000198033; TAA
YPAPQVSTAV

SEQ ID NO: 96891 - protein, 10 aa, Homo sapiens
  Table A; Target 96891; HLA-C*01:02; TUBA3C; ENSG00000198033; TAA
YPAPQVSTAV

SEQ ID NO: 96892 - protein, 10 aa, Homo sapiens
  Table A; Target 96892; HLA-C*02:02; TUBA3C; ENSG00000198033; TAA
YPAPQVSTAV

SEQ ID NO: 96893 - protein, 10 aa, Homo sapiens
  Table A; Target 96893; HLA-C*03:03; TUBA3C; ENSG00000198033; TAA
YPAPQVSTAV

SEQ ID NO: 96894 - protein, 10 aa, Homo sapiens
  Table A; Target 96894; HLA-C*03:04; TUBA3C; ENSG00000198033; TAA
YPAPQVSTAV

SEQ ID NO: 96895 - protein, 10 aa, Homo sapiens
  Table A; Target 96895; HLA-C*04:01; TUBA3C; ENSG00000198033; TAA
YPAPQVSTAV

SEQ ID NO: 96896 - protein, 10 aa, Homo sapiens
  Table A; Target 96896; HLA-C*06:02; TUBA3C; ENSG00000198033; TAA
YPAPQVSTAV

SEQ ID NO: 96897 - protein, 10 aa, Homo sapiens
  Table A; Target 96897; HLA-C*07:01; TUBA3C; ENSG00000198033; TAA
YPAPQVSTAV

SEQ ID NO: 96898 - protein, 10 aa, Homo sapiens
  Table A; Target 96898; HLA-C*07:02; TUBA3C; ENSG00000198033; TAA
YPAPQVSTAV

SEQ ID NO: 96899 - protein, 10 aa, Homo sapiens
  Table A; Target 96899; HLA-C*07:04; TUBA3C; ENSG00000198033; TAA
YPAPQVSTAV

SEQ ID NO: 96900 - protein, 10 aa, Homo sapiens
  Table A; Target 96900; HLA-C*07:06; TUBA3C; ENSG00000198033; TAA
YPAPQVSTAV

SEQ ID NO: 96901 - protein, 10 aa, Homo sapiens
  Table A; Target 96901; HLA-C*14:02; TUBA3C; ENSG00000198033; TAA
YPAPQVSTAV

SEQ ID NO: 96902 - protein, 10 aa, Homo sapiens
  Table A; Target 96902; HLA-C*16:02; TUBA3C; ENSG00000198033; TAA
YPAPQVSTAV

SEQ ID NO: 96903 - protein, 11 aa, Homo sapiens
  Table A; Target 96903; HLA-A*68:01; TUBA3C; ENSG00000198033; TAA
YPAPQVSTAVV

SEQ ID NO: 96904 - protein, 11 aa, Homo sapiens
  Table A; Target 96904; HLA-A*68:02; TUBA3C; ENSG00000198033; TAA
YPAPQVSTAVV

SEQ ID NO: 96905 - protein, 11 aa, Homo sapiens
  Table A; Target 96905; HLA-B*07:02; TUBA3C; ENSG00000198033; TAA
YPAPQVSTAVV

SEQ ID NO: 96906 - protein, 11 aa, Homo sapiens
  Table A; Target 96906; HLA-B*35:01; TUBA3C; ENSG00000198033; TAA
YPAPQVSTAVV

SEQ ID NO: 96907 - protein, 11 aa, Homo sapiens
  Table A; Target 96907; HLA-B*35:03; TUBA3C; ENSG00000198033; TAA
YPAPQVSTAVV

SEQ ID NO: 96908 - protein, 11 aa, Homo sapiens
  Table A; Target 96908; HLA-B*39:01; TUBA3C; ENSG00000198033; TAA
YPAPQVSTAVV

SEQ ID NO: 96909 - protein, 11 aa, Homo sapiens
  Table A; Target 96909; HLA-B*51:01; TUBA3C; ENSG00000198033; TAA
YPAPQVSTAVV

SEQ ID NO: 96910 - protein, 11 aa, Homo sapiens
  Table A; Target 96910; HLA-B*54:01; TUBA3C; ENSG00000198033; TAA
YPAPQVSTAVV

SEQ ID NO: 96911 - protein, 11 aa, Homo sapiens
  Table A; Target 96911; HLA-B*55:01; TUBA3C; ENSG00000198033; TAA
YPAPQVSTAVV

SEQ ID NO: 96912 - protein, 11 aa, Homo sapiens
  Table A; Target 96912; HLA-B*56:01; TUBA3C; ENSG00000198033; TAA
YPAPQVSTAVV

SEQ ID NO: 96913 - protein, 11 aa, Homo sapiens
  Table A; Target 96913; HLA-C*01:02; TUBA3C; ENSG00000198033; TAA
YPAPQVSTAVV

SEQ ID NO: 96914 - protein, 11 aa, Homo sapiens
  Table A; Target 96914; HLA-C*02:02; TUBA3C; ENSG00000198033; TAA
YPAPQVSTAVV

SEQ ID NO: 96915 - protein, 11 aa, Homo sapiens
  Table A; Target 96915; HLA-C*04:01; TUBA3C; ENSG00000198033; TAA
YPAPQVSTAVV

SEQ ID NO: 96916 - protein, 11 aa, Homo sapiens
  Table A; Target 96916; HLA-C*06:02; TUBA3C; ENSG00000198033; TAA
YPAPQVSTAVV

SEQ ID NO: 96917 - protein, 11 aa, Homo sapiens
  Table A; Target 96917; HLA-C*07:01; TUBA3C; ENSG00000198033; TAA
YPAPQVSTAVV

SEQ ID NO: 96918 - protein, 11 aa, Homo sapiens
  Table A; Target 96918; HLA-C*07:02; TUBA3C; ENSG00000198033; TAA
YPAPQVSTAVV

SEQ ID NO: 96919 - protein, 11 aa, Homo sapiens
  Table A; Target 96919; HLA-C*07:06; TUBA3C; ENSG00000198033; TAA
YPAPQVSTAVV

SEQ ID NO: 96920 - protein, 11 aa, Homo sapiens
  Table A; Target 96920; HLA-C*12:03; TUBA3C; ENSG00000198033; TAA
YPAPQVSTAVV

SEQ ID NO: 96921 - protein, 11 aa, Homo sapiens
  Table A; Target 96921; HLA-C*14:02; TUBA3C; ENSG00000198033; TAA
YPAPQVSTAVV

SEQ ID NO: 96922 - protein, 8 aa, Homo sapiens
  Table A; Target 96922; HLA-B*08:01; TUBA3C; ENSG00000198033; TAA
YPRIHFPL

SEQ ID NO: 96923 - protein, 9 aa, Homo sapiens
  Table A; Target 96923; HLA-B*54:01; TUBA3C; ENSG00000198033; TAA
YPRIHFPLA

SEQ ID NO: 96924 - protein, 9 aa, Homo sapiens
  Table A; Target 96924; HLA-A*02:07; TUBA3C; ENSG00000198033; TAA
YQPPTVVPG

SEQ ID NO: 96925 - protein, 9 aa, Homo sapiens
  Table A; Target 96925; HLA-B*13:02; TUBA3C; ENSG00000198033; TAA
YQPPTVVPG

SEQ ID NO: 96926 - protein, 9 aa, Homo sapiens
  Table A; Target 96926; HLA-B*27:05; TUBA3C; ENSG00000198033; TAA
YQPPTVVPG

SEQ ID NO: 96927 - protein, 9 aa, Homo sapiens
  Table A; Target 96927; HLA-C*04:01; TUBA3C; ENSG00000198033; TAA
YQPPTVVPG

SEQ ID NO: 96928 - protein, 9 aa, Homo sapiens
  Table A; Target 96928; HLA-C*06:02; TUBA3C; ENSG00000198033; TAA
YQPPTVVPG

SEQ ID NO: 96929 - protein, 9 aa, Homo sapiens
  Table A; Target 96929; HLA-C*07:01; TUBA3C; ENSG00000198033; TAA
YQPPTVVPG

SEQ ID NO: 96930 - protein, 9 aa, Homo sapiens
  Table A; Target 96930; HLA-C*07:02; TUBA3C; ENSG00000198033; TAA
YQPPTVVPG

SEQ ID NO: 96931 - protein, 9 aa, Homo sapiens
  Table A; Target 96931; HLA-C*07:04; TUBA3C; ENSG00000198033; TAA
YQPPTVVPG

SEQ ID NO: 96932 - protein, 9 aa, Homo sapiens
  Table A; Target 96932; HLA-C*12:03; TUBA3C; ENSG00000198033; TAA
YQPPTVVPG

SEQ ID NO: 96933 - protein, 10 aa, Homo sapiens
  Table A; Target 96933; HLA-A*02:01; TUBA3C; ENSG00000198033; TAA
YQPPTVVPGG

SEQ ID NO: 96934 - protein, 10 aa, Homo sapiens
  Table A; Target 96934; HLA-A*02:03; TUBA3C; ENSG00000198033; TAA
YQPPTVVPGG

SEQ ID NO: 96935 - protein, 10 aa, Homo sapiens
  Table A; Target 96935; HLA-A*02:04; TUBA3C; ENSG00000198033; TAA
YQPPTVVPGG

SEQ ID NO: 96936 - protein, 10 aa, Homo sapiens
  Table A; Target 96936; HLA-A*02:07; TUBA3C; ENSG00000198033; TAA
YQPPTVVPGG

SEQ ID NO: 96937 - protein, 10 aa, Homo sapiens
  Table A; Target 96937; HLA-A*24:02; TUBA3C; ENSG00000198033; TAA
YQPPTVVPGG

SEQ ID NO: 96938 - protein, 10 aa, Homo sapiens
  Table A; Target 96938; HLA-A*26:01; TUBA3C; ENSG00000198033; TAA
YQPPTVVPGG

SEQ ID NO: 96939 - protein, 10 aa, Homo sapiens
  Table A; Target 96939; HLA-B*13:02; TUBA3C; ENSG00000198033; TAA
YQPPTVVPGG

SEQ ID NO: 96940 - protein, 10 aa, Homo sapiens
  Table A; Target 96940; HLA-B*27:05; TUBA3C; ENSG00000198033; TAA
YQPPTVVPGG

SEQ ID NO: 96941 - protein, 10 aa, Homo sapiens
  Table A; Target 96941; HLA-B*40:02; TUBA3C; ENSG00000198033; TAA
YQPPTVVPGG

SEQ ID NO: 96942 - protein, 10 aa, Homo sapiens
  Table A; Target 96942; HLA-C*04:01; TUBA3C; ENSG00000198033; TAA
YQPPTVVPGG

SEQ ID NO: 96943 - protein, 10 aa, Homo sapiens
  Table A; Target 96943; HLA-C*06:02; TUBA3C; ENSG00000198033; TAA
YQPPTVVPGG

SEQ ID NO: 96944 - protein, 10 aa, Homo sapiens
  Table A; Target 96944; HLA-C*07:01; TUBA3C; ENSG00000198033; TAA
YQPPTVVPGG

SEQ ID NO: 96945 - protein, 10 aa, Homo sapiens
  Table A; Target 96945; HLA-C*07:02; TUBA3C; ENSG00000198033; TAA
YQPPTVVPGG

SEQ ID NO: 96946 - protein, 8 aa, Homo sapiens
  Table A; Target 96946; HLA-A*03:02; TUBA3C; ENSG00000198033; TAA
YRGDVVPK

SEQ ID NO: 96947 - protein, 8 aa, Homo sapiens
  Table A; Target 96947; HLA-B*27:02; TUBA3C; ENSG00000198033; TAA
YRGDVVPK

SEQ ID NO: 96948 - protein, 8 aa, Homo sapiens
  Table A; Target 96948; HLA-B*27:05; TUBA3C; ENSG00000198033; TAA
YRGDVVPK

SEQ ID NO: 96949 - protein, 8 aa, Homo sapiens
  Table A; Target 96949; HLA-C*06:02; TUBA3C; ENSG00000198033; TAA
YRGDVVPK

SEQ ID NO: 96950 - protein, 8 aa, Homo sapiens
  Table A; Target 96950; HLA-C*07:01; TUBA3C; ENSG00000198033; TAA
YRGDVVPK

SEQ ID NO: 96951 - protein, 8 aa, Homo sapiens
  Table A; Target 96951; HLA-C*07:04; TUBA3C; ENSG00000198033; TAA
YRGDVVPK

SEQ ID NO: 96952 - protein, 8 aa, Homo sapiens
  Table A; Target 96952; HLA-C*12:03; TUBA3C; ENSG00000198033; TAA
YRGDVVPK

SEQ ID NO: 96953 - protein, 10 aa, Homo sapiens
  Table A; Target 96953; HLA-C*06:02; TUBA3C; ENSG00000198033; TAA
YRGDVVPKDV

SEQ ID NO: 96954 - protein, 8 aa, Homo sapiens
  Table A; Target 96954; HLA-B*08:01; TUBA3C; ENSG00000198033; TAA
YTIGKEIV

SEQ ID NO: 96955 - protein, 8 aa, Homo sapiens
  Table A; Target 96955; HLA-C*12:03; TUBA3C; ENSG00000198033; TAA
YTIGKEIV

SEQ ID NO: 96956 - protein, 10 aa, Homo sapiens
  Table A; Target 96956; HLA-A*02:01; TUBA3C; ENSG00000198033; TAA
YTIGKEIVDL

SEQ ID NO: 96957 - protein, 10 aa, Homo sapiens
  Table A; Target 96957; HLA-A*02:03; TUBA3C; ENSG00000198033; TAA
YTIGKEIVDL

SEQ ID NO: 96958 - protein, 10 aa, Homo sapiens
  Table A; Target 96958; HLA-A*02:04; TUBA3C; ENSG00000198033; TAA
YTIGKEIVDL

SEQ ID NO: 96959 - protein, 10 aa, Homo sapiens
  Table A; Target 96959; HLA-A*02:07; TUBA3C; ENSG00000198033; TAA
YTIGKEIVDL

SEQ ID NO: 96960 - protein, 10 aa, Homo sapiens
  Table A; Target 96960; HLA-A*25:01; TUBA3C; ENSG00000198033; TAA
YTIGKEIVDL

SEQ ID NO: 96961 - protein, 10 aa, Homo sapiens
  Table A; Target 96961; HLA-A*26:01; TUBA3C; ENSG00000198033; TAA
YTIGKEIVDL

SEQ ID NO: 96962 - protein, 10 aa, Homo sapiens
  Table A; Target 96962; HLA-A*68:02; TUBA3C; ENSG00000198033; TAA
YTIGKEIVDL

SEQ ID NO: 96963 - protein, 10 aa, Homo sapiens
  Table A; Target 96963; HLA-B*27:05; TUBA3C; ENSG00000198033; TAA
YTIGKEIVDL

SEQ ID NO: 96964 - protein, 10 aa, Homo sapiens
  Table A; Target 96964; HLA-B*35:03; TUBA3C; ENSG00000198033; TAA
YTIGKEIVDL

SEQ ID NO: 96965 - protein, 10 aa, Homo sapiens
  Table A; Target 96965; HLA-B*40:02; TUBA3C; ENSG00000198033; TAA
YTIGKEIVDL

SEQ ID NO: 96966 - protein, 10 aa, Homo sapiens
  Table A; Target 96966; HLA-B*58:01; TUBA3C; ENSG00000198033; TAA
YTIGKEIVDL

SEQ ID NO: 96967 - protein, 10 aa, Homo sapiens
  Table A; Target 96967; HLA-C*03:03; TUBA3C; ENSG00000198033; TAA
YTIGKEIVDL

SEQ ID NO: 96968 - protein, 10 aa, Homo sapiens
  Table A; Target 96968; HLA-C*03:04; TUBA3C; ENSG00000198033; TAA
YTIGKEIVDL

SEQ ID NO: 96969 - protein, 10 aa, Homo sapiens
  Table A; Target 96969; HLA-C*04:01; TUBA3C; ENSG00000198033; TAA
YTIGKEIVDL

SEQ ID NO: 96970 - protein, 10 aa, Homo sapiens
  Table A; Target 96970; HLA-C*06:02; TUBA3C; ENSG00000198033; TAA
YTIGKEIVDL

SEQ ID NO: 96971 - protein, 10 aa, Homo sapiens
  Table A; Target 96971; HLA-C*07:01; TUBA3C; ENSG00000198033; TAA
YTIGKEIVDL

SEQ ID NO: 96972 - protein, 10 aa, Homo sapiens
  Table A; Target 96972; HLA-C*07:02; TUBA3C; ENSG00000198033; TAA
YTIGKEIVDL

SEQ ID NO: 96973 - protein, 10 aa, Homo sapiens
  Table A; Target 96973; HLA-C*07:04; TUBA3C; ENSG00000198033; TAA
YTIGKEIVDL

SEQ ID NO: 96974 - protein, 10 aa, Homo sapiens
  Table A; Target 96974; HLA-C*12:03; TUBA3C; ENSG00000198033; TAA
YTIGKEIVDL

SEQ ID NO: 96975 - protein, 10 aa, Homo sapiens
  Table A; Target 96975; HLA-C*16:02; TUBA3C; ENSG00000198033; TAA
YTIGKEIVDL

SEQ ID NO: 96976 - protein, 11 aa, Homo sapiens
  Table A; Target 96976; HLA-A*02:03; TUBA3C; ENSG00000198033; TAA
YTIGKEIVDLV

SEQ ID NO: 96977 - protein, 11 aa, Homo sapiens
  Table A; Target 96977; HLA-A*68:02; TUBA3C; ENSG00000198033; TAA
YTIGKEIVDLV

SEQ ID NO: 96978 - protein, 8 aa, Homo sapiens
  Table A; Target 96978; HLA-C*06:02; TUBA3C; ENSG00000198033; TAA
YTNLNRLI

SEQ ID NO: 96979 - protein, 8 aa, Homo sapiens
  Table A; Target 96979; HLA-C*07:01; TUBA3C; ENSG00000198033; TAA
YTNLNRLI

SEQ ID NO: 96980 - protein, 10 aa, Homo sapiens
  Table A; Target 96980; HLA-C*07:01; TUBA3C; ENSG00000198033; TAA
YTNLNRLIGQ

SEQ ID NO: 96981 - protein, 11 aa, Homo sapiens
  Table A; Target 96981; HLA-A*01:01; TUBA3C; ENSG00000198033; TAA
YTNLNRLIGQI

SEQ ID NO: 96982 - protein, 8 aa, Homo sapiens
  Table A; Target 96982; HLA-C*01:02; TUBA3C; ENSG00000198033; TAA
YVGEGMEE

SEQ ID NO: 96983 - protein, 8 aa, Homo sapiens
  Table A; Target 96983; HLA-C*03:03; TUBA3C; ENSG00000198033; TAA
YVGEGMEE

SEQ ID NO: 96984 - protein, 8 aa, Homo sapiens
  Table A; Target 96984; HLA-C*04:01; TUBA3C; ENSG00000198033; TAA
YVGEGMEE

SEQ ID NO: 96985 - protein, 8 aa, Homo sapiens
  Table A; Target 96985; HLA-C*07:01; TUBA3C; ENSG00000198033; TAA
YVGEGMEE

SEQ ID NO: 96986 - protein, 8 aa, Homo sapiens
  Table A; Target 96986; HLA-C*07:04; TUBA3C; ENSG00000198033; TAA
YVGEGMEE

SEQ ID NO: 96987 - protein, 8 aa, Homo sapiens
  Table A; Target 96987; HLA-C*12:03; TUBA3C; ENSG00000198033; TAA
YVGEGMEE

SEQ ID NO: 96988 - protein, 8 aa, Homo sapiens
  Table A; Target 96988; HLA-C*14:02; TUBA3C; ENSG00000198033; TAA
YVGEGMEE

SEQ ID NO: 96989 - protein, 11 aa, Homo sapiens
  Table A; Target 96989; HLA-A*26:01; TUBA3C; ENSG00000198033; TAA
YVGEGMEEGEF

SEQ ID NO: 96990 - protein, 11 aa, Homo sapiens
  Table A; Target 96990; HLA-B*15:01; TUBA3C; ENSG00000198033; TAA
YVGEGMEEGEF

SEQ ID NO: 96991 - protein, 11 aa, Homo sapiens
  Table A; Target 96991; HLA-B*27:05; TUBA3C; ENSG00000198033; TAA
YVGEGMEEGEF

SEQ ID NO: 96992 - protein, 11 aa, Homo sapiens
  Table A; Target 96992; HLA-C*03:03; TUBA3C; ENSG00000198033; TAA
YVGEGMEEGEF

SEQ ID NO: 96993 - protein, 11 aa, Homo sapiens
  Table A; Target 96993; HLA-C*07:01; TUBA3C; ENSG00000198033; TAA
YVGEGMEEGEF

SEQ ID NO: 96994 - protein, 11 aa, Homo sapiens
  Table A; Target 96994; HLA-C*07:04; TUBA3C; ENSG00000198033; TAA
YVGEGMEEGEF

SEQ ID NO: 96995 - protein, 11 aa, Homo sapiens
  Table A; Target 96995; HLA-C*12:03; TUBA3C; ENSG00000198033; TAA
YVGEGMEEGEF

SEQ ID NO: 96996 - protein, 8 aa, Homo sapiens
  Table A; Target 96996; HLA-A*23:01; TYR; ENSG00000077498; TAA
AAMVGAVL

SEQ ID NO: 96997 - protein, 8 aa, Homo sapiens
  Table A; Target 96997; HLA-A*32:01; TYR; ENSG00000077498; TAA
AAMVGAVL

SEQ ID NO: 96998 - protein, 8 aa, Homo sapiens
  Table A; Target 96998; HLA-B*07:02; TYR; ENSG00000077498; TAA
AAMVGAVL

SEQ ID NO: 96999 - protein, 8 aa, Homo sapiens
  Table A; Target 96999; HLA-B*08:01; TYR; ENSG00000077498; TAA
AAMVGAVL

SEQ ID NO: 97000 - protein, 8 aa, Homo sapiens
  Table A; Target 97000; HLA-B*15:01; TYR; ENSG00000077498; TAA
AAMVGAVL

SEQ ID NO: 97001 - protein, 8 aa, Homo sapiens
  Table A; Target 97001; HLA-B*15:03; TYR; ENSG00000077498; TAA
AAMVGAVL

SEQ ID NO: 97002 - protein, 8 aa, Homo sapiens
  Table A; Target 97002; HLA-B*35:03; TYR; ENSG00000077498; TAA
AAMVGAVL

SEQ ID NO: 97003 - protein, 8 aa, Homo sapiens
  Table A; Target 97003; HLA-B*37:01; TYR; ENSG00000077498; TAA
AAMVGAVL

SEQ ID NO: 97004 - protein, 8 aa, Homo sapiens
  Table A; Target 97004; HLA-B*39:01; TYR; ENSG00000077498; TAA
AAMVGAVL

SEQ ID NO: 97005 - protein, 8 aa, Homo sapiens
  Table A; Target 97005; HLA-B*40:01; TYR; ENSG00000077498; TAA
AAMVGAVL

SEQ ID NO: 97006 - protein, 8 aa, Homo sapiens
  Table A; Target 97006; HLA-B*40:02; TYR; ENSG00000077498; TAA
AAMVGAVL

SEQ ID NO: 97007 - protein, 8 aa, Homo sapiens
  Table A; Target 97007; HLA-B*46:01; TYR; ENSG00000077498; TAA
AAMVGAVL

SEQ ID NO: 97008 - protein, 8 aa, Homo sapiens
  Table A; Target 97008; HLA-B*58:01; TYR; ENSG00000077498; TAA
AAMVGAVL

SEQ ID NO: 97009 - protein, 8 aa, Homo sapiens
  Table A; Target 97009; HLA-C*01:02; TYR; ENSG00000077498; TAA
AAMVGAVL

SEQ ID NO: 97010 - protein, 8 aa, Homo sapiens
  Table A; Target 97010; HLA-C*02:02; TYR; ENSG00000077498; TAA
AAMVGAVL

SEQ ID NO: 97011 - protein, 8 aa, Homo sapiens
  Table A; Target 97011; HLA-C*03:03; TYR; ENSG00000077498; TAA
AAMVGAVL

SEQ ID NO: 97012 - protein, 8 aa, Homo sapiens
  Table A; Target 97012; HLA-C*03:04; TYR; ENSG00000077498; TAA
AAMVGAVL

SEQ ID NO: 97013 - protein, 8 aa, Homo sapiens
  Table A; Target 97013; HLA-C*05:01; TYR; ENSG00000077498; TAA
AAMVGAVL

SEQ ID NO: 97014 - protein, 8 aa, Homo sapiens
  Table A; Target 97014; HLA-C*07:02; TYR; ENSG00000077498; TAA
AAMVGAVL

SEQ ID NO: 97015 - protein, 8 aa, Homo sapiens
  Table A; Target 97015; HLA-C*07:04; TYR; ENSG00000077498; TAA
AAMVGAVL

SEQ ID NO: 97016 - protein, 8 aa, Homo sapiens
  Table A; Target 97016; HLA-C*12:03; TYR; ENSG00000077498; TAA
AAMVGAVL

SEQ ID NO: 97017 - protein, 8 aa, Homo sapiens
  Table A; Target 97017; HLA-C*14:02; TYR; ENSG00000077498; TAA
AAMVGAVL

SEQ ID NO: 97018 - protein, 8 aa, Homo sapiens
  Table A; Target 97018; HLA-C*16:01; TYR; ENSG00000077498; TAA
AAMVGAVL

SEQ ID NO: 97019 - protein, 8 aa, Homo sapiens
  Table A; Target 97019; HLA-C*16:02; TYR; ENSG00000077498; TAA
AAMVGAVL

SEQ ID NO: 97020 - protein, 8 aa, Homo sapiens
  Table A; Target 97020; HLA-C*16:04; TYR; ENSG00000077498; TAA
AAMVGAVL

SEQ ID NO: 97021 - protein, 10 aa, Homo sapiens
  Table A; Target 97021; HLA-B*54:01; TYR; ENSG00000077498; TAA
AAMVGAVLTA

SEQ ID NO: 97022 - protein, 10 aa, Homo sapiens
  Table A; Target 97022; HLA-B*56:01; TYR; ENSG00000077498; TAA
AAMVGAVLTA

SEQ ID NO: 97023 - protein, 10 aa, Homo sapiens
  Table A; Target 97023; HLA-C*16:04; TYR; ENSG00000077498; TAA
AAMVGAVLTA

SEQ ID NO: 97024 - protein, 11 aa, Homo sapiens
  Table A; Target 97024; HLA-A*03:01; TYR; ENSG00000077498; TAA
AAMVGAVLTAL

SEQ ID NO: 97025 - protein, 11 aa, Homo sapiens
  Table A; Target 97025; HLA-A*30:01; TYR; ENSG00000077498; TAA
AAMVGAVLTAL

SEQ ID NO: 97026 - protein, 11 aa, Homo sapiens
  Table A; Target 97026; HLA-B*07:02; TYR; ENSG00000077498; TAA
AAMVGAVLTAL

SEQ ID NO: 97027 - protein, 11 aa, Homo sapiens
  Table A; Target 97027; HLA-B*15:01; TYR; ENSG00000077498; TAA
AAMVGAVLTAL

SEQ ID NO: 97028 - protein, 11 aa, Homo sapiens
  Table A; Target 97028; HLA-B*27:02; TYR; ENSG00000077498; TAA
AAMVGAVLTAL

SEQ ID NO: 97029 - protein, 11 aa, Homo sapiens
  Table A; Target 97029; HLA-B*40:01; TYR; ENSG00000077498; TAA
AAMVGAVLTAL

SEQ ID NO: 97030 - protein, 11 aa, Homo sapiens
  Table A; Target 97030; HLA-B*46:01; TYR; ENSG00000077498; TAA
AAMVGAVLTAL

SEQ ID NO: 97031 - protein, 11 aa, Homo sapiens
  Table A; Target 97031; HLA-B*58:01; TYR; ENSG00000077498; TAA
AAMVGAVLTAL

SEQ ID NO: 97032 - protein, 11 aa, Homo sapiens
  Table A; Target 97032; HLA-C*01:02; TYR; ENSG00000077498; TAA
AAMVGAVLTAL

SEQ ID NO: 97033 - protein, 11 aa, Homo sapiens
  Table A; Target 97033; HLA-C*02:02; TYR; ENSG00000077498; TAA
AAMVGAVLTAL

SEQ ID NO: 97034 - protein, 11 aa, Homo sapiens
  Table A; Target 97034; HLA-C*03:03; TYR; ENSG00000077498; TAA
AAMVGAVLTAL

SEQ ID NO: 97035 - protein, 11 aa, Homo sapiens
  Table A; Target 97035; HLA-C*03:04; TYR; ENSG00000077498; TAA
AAMVGAVLTAL

SEQ ID NO: 97036 - protein, 11 aa, Homo sapiens
  Table A; Target 97036; HLA-C*07:02; TYR; ENSG00000077498; TAA
AAMVGAVLTAL

SEQ ID NO: 97037 - protein, 11 aa, Homo sapiens
  Table A; Target 97037; HLA-C*16:04; TYR; ENSG00000077498; TAA
AAMVGAVLTAL

SEQ ID NO: 97038 - protein, 10 aa, Homo sapiens
  Table A; Target 97038; HLA-B*07:02; TYR; ENSG00000077498; TAA
AANFSFRNTL

SEQ ID NO: 97039 - protein, 10 aa, Homo sapiens
  Table A; Target 97039; HLA-C*07:02; TYR; ENSG00000077498; TAA
AANFSFRNTL

SEQ ID NO: 97040 - protein, 9 aa, Homo sapiens
  Table A; Target 97040; HLA-C*16:01; TYR; ENSG00000077498; TAA
ACVSSKNLM

SEQ ID NO: 97041 - protein, 11 aa, Homo sapiens
  Table A; Target 97041; HLA-A*11:01; TYR; ENSG00000077498; TAA
ACVSSKNLMEK

SEQ ID NO: 97042 - protein, 8 aa, Homo sapiens
  Table A; Target 97042; HLA-B*37:01; TYR; ENSG00000077498; TAA
ADASQSSM

SEQ ID NO: 97043 - protein, 10 aa, Homo sapiens
  Table A; Target 97043; HLA-C*04:01; TYR; ENSG00000077498; TAA
ADASQSSMHN

SEQ ID NO: 97044 - protein, 10 aa, Homo sapiens
  Table A; Target 97044; HLA-C*06:02; TYR; ENSG00000077498; TAA
ADASQSSMHN

SEQ ID NO: 97045 - protein, 10 aa, Homo sapiens
  Table A; Target 97045; HLA-C*07:01; TYR; ENSG00000077498; TAA
ADASQSSMHN

SEQ ID NO: 97046 - protein, 9 aa, Homo sapiens
  Table A; Target 97046; HLA-A*30:01; TYR; ENSG00000077498; TAA
ADVEFCLSL

SEQ ID NO: 97047 - protein, 9 aa, Homo sapiens
  Table A; Target 97047; HLA-B*37:01; TYR; ENSG00000077498; TAA
ADVEFCLSL

SEQ ID NO: 97048 - protein, 9 aa, Homo sapiens
  Table A; Target 97048; HLA-B*40:02; TYR; ENSG00000077498; TAA
ADVEFCLSL

SEQ ID NO: 97049 - protein, 9 aa, Homo sapiens
  Table A; Target 97049; HLA-A*24:02; TYR; ENSG00000077498; TAA
AFLPWHRLF

SEQ ID NO: 97050 - protein, 10 aa, Homo sapiens
  Table A; Target 97050; HLA-A*23:01; TYR; ENSG00000077498; TAA
AFVDSIFEQW

SEQ ID NO: 97051 - protein, 10 aa, Homo sapiens
  Table A; Target 97051; HLA-A*24:02; TYR; ENSG00000077498; TAA
AFVDSIFEQW

SEQ ID NO: 97052 - protein, 10 aa, Homo sapiens
  Table A; Target 97052; HLA-A*25:01; TYR; ENSG00000077498; TAA
AFVDSIFEQW

SEQ ID NO: 97053 - protein, 10 aa, Homo sapiens
  Table A; Target 97053; HLA-A*29:02; TYR; ENSG00000077498; TAA
AFVDSIFEQW

SEQ ID NO: 97054 - protein, 10 aa, Homo sapiens
  Table A; Target 97054; HLA-B*44:02; TYR; ENSG00000077498; TAA
AFVDSIFEQW

SEQ ID NO: 97055 - protein, 10 aa, Homo sapiens
  Table A; Target 97055; HLA-B*44:03; TYR; ENSG00000077498; TAA
AFVDSIFEQW

SEQ ID NO: 97056 - protein, 10 aa, Homo sapiens
  Table A; Target 97056; HLA-B*57:01; TYR; ENSG00000077498; TAA
AFVDSIFEQW

SEQ ID NO: 97057 - protein, 10 aa, Homo sapiens
  Table A; Target 97057; HLA-C*16:04; TYR; ENSG00000077498; TAA
AFVDSIFEQW

SEQ ID NO: 97058 - protein, 9 aa, Homo sapiens
  Table A; Target 97058; HLA-A*31:01; TYR; ENSG00000077498; TAA
AGLVSLLCR

SEQ ID NO: 97059 - protein, 8 aa, Homo sapiens
  Table A; Target 97059; HLA-B*38:01; TYR; ENSG00000077498; TAA
AHEAPAFL

SEQ ID NO: 97060 - protein, 9 aa, Homo sapiens
  Table A; Target 97060; HLA-A*30:02; TYR; ENSG00000077498; TAA
AKHTISSDY

SEQ ID NO: 97061 - protein, 9 aa, Homo sapiens
  Table A; Target 97061; HLA-B*15:03; TYR; ENSG00000077498; TAA
AKHTISSDY

SEQ ID NO: 97062 - protein, 9 aa, Homo sapiens
  Table A; Target 97062; HLA-A*02:01; TYR; ENSG00000077498; TAA
ALLAGLVSL

SEQ ID NO: 97063 - protein, 9 aa, Homo sapiens
  Table A; Target 97063; HLA-A*02:03; TYR; ENSG00000077498; TAA
ALLAGLVSL

SEQ ID NO: 97064 - protein, 9 aa, Homo sapiens
  Table A; Target 97064; HLA-A*02:04; TYR; ENSG00000077498; TAA
ALLAGLVSL

SEQ ID NO: 97065 - protein, 9 aa, Homo sapiens
  Table A; Target 97065; HLA-A*02:07; TYR; ENSG00000077498; TAA
ALLAGLVSL

SEQ ID NO: 97066 - protein, 9 aa, Homo sapiens
  Table A; Target 97066; HLA-A*23:01; TYR; ENSG00000077498; TAA
ALLAGLVSL

SEQ ID NO: 97067 - protein, 9 aa, Homo sapiens
  Table A; Target 97067; HLA-A*24:02; TYR; ENSG00000077498; TAA
ALLAGLVSL

SEQ ID NO: 97068 - protein, 9 aa, Homo sapiens
  Table A; Target 97068; HLA-A*32:01; TYR; ENSG00000077498; TAA
ALLAGLVSL

SEQ ID NO: 97069 - protein, 9 aa, Homo sapiens
  Table A; Target 97069; HLA-B*08:01; TYR; ENSG00000077498; TAA
ALLAGLVSL

SEQ ID NO: 97070 - protein, 9 aa, Homo sapiens
  Table A; Target 97070; HLA-B*13:02; TYR; ENSG00000077498; TAA
ALLAGLVSL

SEQ ID NO: 97071 - protein, 9 aa, Homo sapiens
  Table A; Target 97071; HLA-B*15:01; TYR; ENSG00000077498; TAA
ALLAGLVSL

SEQ ID NO: 97072 - protein, 9 aa, Homo sapiens
  Table A; Target 97072; HLA-B*37:01; TYR; ENSG00000077498; TAA
ALLAGLVSL

SEQ ID NO: 97073 - protein, 9 aa, Homo sapiens
  Table A; Target 97073; HLA-B*46:01; TYR; ENSG00000077498; TAA
ALLAGLVSL

SEQ ID NO: 97074 - protein, 9 aa, Homo sapiens
  Table A; Target 97074; HLA-B*55:01; TYR; ENSG00000077498; TAA
ALLAGLVSL

SEQ ID NO: 97075 - protein, 9 aa, Homo sapiens
  Table A; Target 97075; HLA-C*01:02; TYR; ENSG00000077498; TAA
ALLAGLVSL

SEQ ID NO: 97076 - protein, 9 aa, Homo sapiens
  Table A; Target 97076; HLA-C*14:02; TYR; ENSG00000077498; TAA
ALLAGLVSL

SEQ ID NO: 97077 - protein, 10 aa, Homo sapiens
  Table A; Target 97077; HLA-A*02:01; TYR; ENSG00000077498; TAA
ALLAGLVSLL

SEQ ID NO: 97078 - protein, 10 aa, Homo sapiens
  Table A; Target 97078; HLA-A*02:03; TYR; ENSG00000077498; TAA
ALLAGLVSLL

SEQ ID NO: 97079 - protein, 10 aa, Homo sapiens
  Table A; Target 97079; HLA-A*02:04; TYR; ENSG00000077498; TAA
ALLAGLVSLL

SEQ ID NO: 97080 - protein, 9 aa, Homo sapiens
  Table A; Target 97080; HLA-B*44:02; TYR; ENSG00000077498; TAA
ALLGGSEIW

SEQ ID NO: 97081 - protein, 9 aa, Homo sapiens
  Table A; Target 97081; HLA-B*57:01; TYR; ENSG00000077498; TAA
ALLGGSEIW

SEQ ID NO: 97082 - protein, 9 aa, Homo sapiens
  Table A; Target 97082; HLA-B*58:01; TYR; ENSG00000077498; TAA
ALLGGSEIW

SEQ ID NO: 97083 - protein, 8 aa, Homo sapiens
  Table A; Target 97083; HLA-C*04:01; TYR; ENSG00000077498; TAA
AMVGAVLT

SEQ ID NO: 97084 - protein, 9 aa, Homo sapiens
  Table A; Target 97084; HLA-A*02:01; TYR; ENSG00000077498; TAA
AMVGAVLTA

SEQ ID NO: 97085 - protein, 9 aa, Homo sapiens
  Table A; Target 97085; HLA-A*02:03; TYR; ENSG00000077498; TAA
AMVGAVLTA

SEQ ID NO: 97086 - protein, 9 aa, Homo sapiens
  Table A; Target 97086; HLA-A*02:04; TYR; ENSG00000077498; TAA
AMVGAVLTA

SEQ ID NO: 97087 - protein, 9 aa, Homo sapiens
  Table A; Target 97087; HLA-A*02:07; TYR; ENSG00000077498; TAA
AMVGAVLTA

SEQ ID NO: 97088 - protein, 9 aa, Homo sapiens
  Table A; Target 97088; HLA-A*30:01; TYR; ENSG00000077498; TAA
AMVGAVLTA

SEQ ID NO: 97089 - protein, 9 aa, Homo sapiens
  Table A; Target 97089; HLA-A*32:01; TYR; ENSG00000077498; TAA
AMVGAVLTA

SEQ ID NO: 97090 - protein, 9 aa, Homo sapiens
  Table A; Target 97090; HLA-B*13:02; TYR; ENSG00000077498; TAA
AMVGAVLTA

SEQ ID NO: 97091 - protein, 9 aa, Homo sapiens
  Table A; Target 97091; HLA-B*15:01; TYR; ENSG00000077498; TAA
AMVGAVLTA

SEQ ID NO: 97092 - protein, 9 aa, Homo sapiens
  Table A; Target 97092; HLA-B*40:02; TYR; ENSG00000077498; TAA
AMVGAVLTA

SEQ ID NO: 97093 - protein, 9 aa, Homo sapiens
  Table A; Target 97093; HLA-B*46:01; TYR; ENSG00000077498; TAA
AMVGAVLTA

SEQ ID NO: 97094 - protein, 9 aa, Homo sapiens
  Table A; Target 97094; HLA-B*54:01; TYR; ENSG00000077498; TAA
AMVGAVLTA

SEQ ID NO: 97095 - protein, 9 aa, Homo sapiens
  Table A; Target 97095; HLA-B*55:01; TYR; ENSG00000077498; TAA
AMVGAVLTA

SEQ ID NO: 97096 - protein, 9 aa, Homo sapiens
  Table A; Target 97096; HLA-B*56:01; TYR; ENSG00000077498; TAA
AMVGAVLTA

SEQ ID NO: 97097 - protein, 9 aa, Homo sapiens
  Table A; Target 97097; HLA-C*02:02; TYR; ENSG00000077498; TAA
AMVGAVLTA

SEQ ID NO: 97098 - protein, 10 aa, Homo sapiens
  Table A; Target 97098; HLA-A*02:01; TYR; ENSG00000077498; TAA
AMVGAVLTAL

SEQ ID NO: 97099 - protein, 10 aa, Homo sapiens
  Table A; Target 97099; HLA-A*02:03; TYR; ENSG00000077498; TAA
AMVGAVLTAL

SEQ ID NO: 97100 - protein, 10 aa, Homo sapiens
  Table A; Target 97100; HLA-A*02:04; TYR; ENSG00000077498; TAA
AMVGAVLTAL

SEQ ID NO: 97101 - protein, 10 aa, Homo sapiens
  Table A; Target 97101; HLA-A*02:07; TYR; ENSG00000077498; TAA
AMVGAVLTAL

SEQ ID NO: 97102 - protein, 10 aa, Homo sapiens
  Table A; Target 97102; HLA-A*03:01; TYR; ENSG00000077498; TAA
AMVGAVLTAL

SEQ ID NO: 97103 - protein, 10 aa, Homo sapiens
  Table A; Target 97103; HLA-A*23:01; TYR; ENSG00000077498; TAA
AMVGAVLTAL

SEQ ID NO: 97104 - protein, 10 aa, Homo sapiens
  Table A; Target 97104; HLA-A*25:01; TYR; ENSG00000077498; TAA
AMVGAVLTAL

SEQ ID NO: 97105 - protein, 10 aa, Homo sapiens
  Table A; Target 97105; HLA-A*30:01; TYR; ENSG00000077498; TAA
AMVGAVLTAL

SEQ ID NO: 97106 - protein, 10 aa, Homo sapiens
  Table A; Target 97106; HLA-B*15:01; TYR; ENSG00000077498; TAA
AMVGAVLTAL

SEQ ID NO: 97107 - protein, 10 aa, Homo sapiens
  Table A; Target 97107; HLA-B*15:03; TYR; ENSG00000077498; TAA
AMVGAVLTAL

SEQ ID NO: 97108 - protein, 10 aa, Homo sapiens
  Table A; Target 97108; HLA-B*40:01; TYR; ENSG00000077498; TAA
AMVGAVLTAL

SEQ ID NO: 97109 - protein, 10 aa, Homo sapiens
  Table A; Target 97109; HLA-B*40:02; TYR; ENSG00000077498; TAA
AMVGAVLTAL

SEQ ID NO: 97110 - protein, 10 aa, Homo sapiens
  Table A; Target 97110; HLA-B*46:01; TYR; ENSG00000077498; TAA
AMVGAVLTAL

SEQ ID NO: 97111 - protein, 10 aa, Homo sapiens
  Table A; Target 97111; HLA-B*55:01; TYR; ENSG00000077498; TAA
AMVGAVLTAL

SEQ ID NO: 97112 - protein, 10 aa, Homo sapiens
  Table A; Target 97112; HLA-C*01:02; TYR; ENSG00000077498; TAA
AMVGAVLTAL

SEQ ID NO: 97113 - protein, 11 aa, Homo sapiens
  Table A; Target 97113; HLA-A*02:01; TYR; ENSG00000077498; TAA
AMVGAVLTALL

SEQ ID NO: 97114 - protein, 11 aa, Homo sapiens
  Table A; Target 97114; HLA-A*02:03; TYR; ENSG00000077498; TAA
AMVGAVLTALL

SEQ ID NO: 97115 - protein, 9 aa, Homo sapiens
  Table A; Target 97115; HLA-A*03:02; TYR; ENSG00000077498; TAA
ANAPIGHNR

SEQ ID NO: 97116 - protein, 9 aa, Homo sapiens
  Table A; Target 97116; HLA-A*11:01; TYR; ENSG00000077498; TAA
ANAPIGHNR

SEQ ID NO: 97117 - protein, 9 aa, Homo sapiens
  Table A; Target 97117; HLA-A*29:02; TYR; ENSG00000077498; TAA
ANAPIGHNR

SEQ ID NO: 97118 - protein, 9 aa, Homo sapiens
  Table A; Target 97118; HLA-A*31:01; TYR; ENSG00000077498; TAA
ANAPIGHNR

SEQ ID NO: 97119 - protein, 9 aa, Homo sapiens
  Table A; Target 97119; HLA-A*33:01; TYR; ENSG00000077498; TAA
ANAPIGHNR

SEQ ID NO: 97120 - protein, 9 aa, Homo sapiens
  Table A; Target 97120; HLA-A*33:03; TYR; ENSG00000077498; TAA
ANAPIGHNR

SEQ ID NO: 97121 - protein, 9 aa, Homo sapiens
  Table A; Target 97121; HLA-A*68:01; TYR; ENSG00000077498; TAA
ANAPIGHNR

SEQ ID NO: 97122 - protein, 9 aa, Homo sapiens
  Table A; Target 97122; HLA-B*27:05; TYR; ENSG00000077498; TAA
ANAPIGHNR

SEQ ID NO: 97123 - protein, 9 aa, Homo sapiens
  Table A; Target 97123; HLA-B*57:01; TYR; ENSG00000077498; TAA
ANAPIGHNR

SEQ ID NO: 97124 - protein, 9 aa, Homo sapiens
  Table A; Target 97124; HLA-C*07:06; TYR; ENSG00000077498; TAA
ANAPIGHNR

SEQ ID NO: 97125 - protein, 9 aa, Homo sapiens
  Table A; Target 97125; HLA-C*16:02; TYR; ENSG00000077498; TAA
ANAPIGHNR

SEQ ID NO: 97126 - protein, 8 aa, Homo sapiens
  Table A; Target 97126; HLA-A*02:07; TYR; ENSG00000077498; TAA
ANDPIFLL

SEQ ID NO: 97127 - protein, 8 aa, Homo sapiens
  Table A; Target 97127; HLA-C*04:01; TYR; ENSG00000077498; TAA
ANDPIFLL

SEQ ID NO: 97128 - protein, 8 aa, Homo sapiens
  Table A; Target 97128; HLA-C*05:01; TYR; ENSG00000077498; TAA
ANDPIFLL

SEQ ID NO: 97129 - protein, 9 aa, Homo sapiens
  Table A; Target 97129; HLA-A*01:01; TYR; ENSG00000077498; TAA
ANDPIFLLH

SEQ ID NO: 97130 - protein, 9 aa, Homo sapiens
  Table A; Target 97130; HLA-A*03:01; TYR; ENSG00000077498; TAA
ANDPIFLLH

SEQ ID NO: 97131 - protein, 9 aa, Homo sapiens
  Table A; Target 97131; HLA-A*11:01; TYR; ENSG00000077498; TAA
ANDPIFLLH

SEQ ID NO: 97132 - protein, 9 aa, Homo sapiens
  Table A; Target 97132; HLA-A*29:02; TYR; ENSG00000077498; TAA
ANDPIFLLH

SEQ ID NO: 97133 - protein, 9 aa, Homo sapiens
  Table A; Target 97133; HLA-A*32:01; TYR; ENSG00000077498; TAA
ANFSFRNTL

SEQ ID NO: 97134 - protein, 9 aa, Homo sapiens
  Table A; Target 97134; HLA-B*07:02; TYR; ENSG00000077498; TAA
ANFSFRNTL

SEQ ID NO: 97135 - protein, 9 aa, Homo sapiens
  Table A; Target 97135; HLA-B*08:01; TYR; ENSG00000077498; TAA
ANFSFRNTL

SEQ ID NO: 97136 - protein, 9 aa, Homo sapiens
  Table A; Target 97136; HLA-C*02:02; TYR; ENSG00000077498; TAA
ANFSFRNTL

SEQ ID NO: 97137 - protein, 9 aa, Homo sapiens
  Table A; Target 97137; HLA-C*07:02; TYR; ENSG00000077498; TAA
ANFSFRNTL

SEQ ID NO: 97138 - protein, 9 aa, Homo sapiens
  Table A; Target 97138; HLA-C*12:03; TYR; ENSG00000077498; TAA
ANFSFRNTL

SEQ ID NO: 97139 - protein, 9 aa, Homo sapiens
  Table A; Target 97139; HLA-C*16:01; TYR; ENSG00000077498; TAA
ANFSFRNTL

SEQ ID NO: 97140 - protein, 10 aa, Homo sapiens
  Table A; Target 97140; HLA-A*01:01; TYR; ENSG00000077498; TAA
APEKDKFFAY

SEQ ID NO: 97141 - protein, 10 aa, Homo sapiens
  Table A; Target 97141; HLA-B*35:01; TYR; ENSG00000077498; TAA
APEKDKFFAY

SEQ ID NO: 97142 - protein, 10 aa, Homo sapiens
  Table A; Target 97142; HLA-A*25:01; TYR; ENSG00000077498; TAA
APIGHNRESY

SEQ ID NO: 97143 - protein, 10 aa, Homo sapiens
  Table A; Target 97143; HLA-A*30:02; TYR; ENSG00000077498; TAA
APIGHNRESY

SEQ ID NO: 97144 - protein, 10 aa, Homo sapiens
  Table A; Target 97144; HLA-A*32:01; TYR; ENSG00000077498; TAA
APIGHNRESY

SEQ ID NO: 97145 - protein, 10 aa, Homo sapiens
  Table A; Target 97145; HLA-B*07:02; TYR; ENSG00000077498; TAA
APIGHNRESY

SEQ ID NO: 97146 - protein, 10 aa, Homo sapiens
  Table A; Target 97146; HLA-B*15:01; TYR; ENSG00000077498; TAA
APIGHNRESY

SEQ ID NO: 97147 - protein, 10 aa, Homo sapiens
  Table A; Target 97147; HLA-B*35:01; TYR; ENSG00000077498; TAA
APIGHNRESY

SEQ ID NO: 97148 - protein, 10 aa, Homo sapiens
  Table A; Target 97148; HLA-B*44:03; TYR; ENSG00000077498; TAA
APIGHNRESY

SEQ ID NO: 97149 - protein, 10 aa, Homo sapiens
  Table A; Target 97149; HLA-B*46:01; TYR; ENSG00000077498; TAA
APIGHNRESY

SEQ ID NO: 97150 - protein, 10 aa, Homo sapiens
  Table A; Target 97150; HLA-B*55:01; TYR; ENSG00000077498; TAA
APIGHNRESY

SEQ ID NO: 97151 - protein, 10 aa, Homo sapiens
  Table A; Target 97151; HLA-C*07:02; TYR; ENSG00000077498; TAA
APIGHNRESY

SEQ ID NO: 97152 - protein, 11 aa, Homo sapiens
  Table A; Target 97152; HLA-B*07:02; TYR; ENSG00000077498; TAA
APIGHNRESYM

SEQ ID NO: 97153 - protein, 11 aa, Homo sapiens
  Table A; Target 97153; HLA-C*07:02; TYR; ENSG00000077498; TAA
APIGHNRESYM

SEQ ID NO: 97154 - protein, 9 aa, Homo sapiens
  Table A; Target 97154; HLA-A*23:01; TYR; ENSG00000077498; TAA
APLGPQFPF

SEQ ID NO: 97155 - protein, 9 aa, Homo sapiens
  Table A; Target 97155; HLA-A*29:02; TYR; ENSG00000077498; TAA
APLGPQFPF

SEQ ID NO: 97156 - protein, 9 aa, Homo sapiens
  Table A; Target 97156; HLA-A*31:01; TYR; ENSG00000077498; TAA
APLGPQFPF

SEQ ID NO: 97157 - protein, 9 aa, Homo sapiens
  Table A; Target 97157; HLA-B*07:02; TYR; ENSG00000077498; TAA
APLGPQFPF

SEQ ID NO: 97158 - protein, 9 aa, Homo sapiens
  Table A; Target 97158; HLA-B*35:01; TYR; ENSG00000077498; TAA
APLGPQFPF

SEQ ID NO: 97159 - protein, 9 aa, Homo sapiens
  Table A; Target 97159; HLA-B*35:03; TYR; ENSG00000077498; TAA
APLGPQFPF

SEQ ID NO: 97160 - protein, 9 aa, Homo sapiens
  Table A; Target 97160; HLA-B*54:01; TYR; ENSG00000077498; TAA
APLGPQFPF

SEQ ID NO: 97161 - protein, 9 aa, Homo sapiens
  Table A; Target 97161; HLA-B*55:01; TYR; ENSG00000077498; TAA
APLGPQFPF

SEQ ID NO: 97162 - protein, 9 aa, Homo sapiens
  Table A; Target 97162; HLA-B*56:01; TYR; ENSG00000077498; TAA
APLGPQFPF

SEQ ID NO: 97163 - protein, 9 aa, Homo sapiens
  Table A; Target 97163; HLA-B*57:01; TYR; ENSG00000077498; TAA
APLGPQFPF

SEQ ID NO: 97164 - protein, 9 aa, Homo sapiens
  Table A; Target 97164; HLA-C*04:01; TYR; ENSG00000077498; TAA
APLGPQFPF

SEQ ID NO: 97165 - protein, 9 aa, Homo sapiens
  Table A; Target 97165; HLA-C*07:02; TYR; ENSG00000077498; TAA
APLGPQFPF

SEQ ID NO: 97166 - protein, 11 aa, Homo sapiens
  Table A; Target 97166; HLA-B*54:01; TYR; ENSG00000077498; TAA
APLGPQFPFTG

SEQ ID NO: 97167 - protein, 10 aa, Homo sapiens
  Table A; Target 97167; HLA-B*07:02; TYR; ENSG00000077498; TAA
ASQSSMHNAL

SEQ ID NO: 97168 - protein, 10 aa, Homo sapiens
  Table A; Target 97168; HLA-C*03:04; TYR; ENSG00000077498; TAA
ASQSSMHNAL

SEQ ID NO: 97169 - protein, 10 aa, Homo sapiens
  Table A; Target 97169; HLA-C*06:02; TYR; ENSG00000077498; TAA
ASQSSMHNAL

SEQ ID NO: 97170 - protein, 10 aa, Homo sapiens
  Table A; Target 97170; HLA-C*07:02; TYR; ENSG00000077498; TAA
ASQSSMHNAL

SEQ ID NO: 97171 - protein, 10 aa, Homo sapiens
  Table A; Target 97171; HLA-C*16:01; TYR; ENSG00000077498; TAA
ASQSSMHNAL

SEQ ID NO: 97172 - protein, 10 aa, Homo sapiens
  Table A; Target 97172; HLA-A*03:01; TYR; ENSG00000077498; TAA
AVLTALLAGL

SEQ ID NO: 97173 - protein, 10 aa, Homo sapiens
  Table A; Target 97173; HLA-A*23:01; TYR; ENSG00000077498; TAA
AYLTLAKHTI

SEQ ID NO: 97174 - protein, 10 aa, Homo sapiens
  Table A; Target 97174; HLA-A*24:02; TYR; ENSG00000077498; TAA
AYLTLAKHTI

SEQ ID NO: 97175 - protein, 10 aa, Homo sapiens
  Table A; Target 97175; HLA-A*32:01; TYR; ENSG00000077498; TAA
AYLTLAKHTI

SEQ ID NO: 97176 - protein, 8 aa, Homo sapiens
  Table A; Target 97176; HLA-C*07:01; TYR; ENSG00000077498; TAA
CDICTDEY

SEQ ID NO: 97177 - protein, 8 aa, Homo sapiens
  Table A; Target 97177; HLA-B*37:01; TYR; ENSG00000077498; TAA
CVSSKNLM

SEQ ID NO: 97178 - protein, 10 aa, Homo sapiens
  Table A; Target 97178; HLA-A*03:01; TYR; ENSG00000077498; TAA
CVSSKNLMEK

SEQ ID NO: 97179 - protein, 10 aa, Homo sapiens
  Table A; Target 97179; HLA-A*03:02; TYR; ENSG00000077498; TAA
CVSSKNLMEK

SEQ ID NO: 97180 - protein, 10 aa, Homo sapiens
  Table A; Target 97180; HLA-A*11:01; TYR; ENSG00000077498; TAA
CVSSKNLMEK

SEQ ID NO: 97181 - protein, 9 aa, Homo sapiens
  Table A; Target 97181; HLA-A*33:01; TYR; ENSG00000077498; TAA
DALLGGSEI

SEQ ID NO: 97182 - protein, 9 aa, Homo sapiens
  Table A; Target 97182; HLA-B*35:03; TYR; ENSG00000077498; TAA
DALLGGSEI

SEQ ID NO: 97183 - protein, 9 aa, Homo sapiens
  Table A; Target 97183; HLA-B*38:01; TYR; ENSG00000077498; TAA
DALLGGSEI

SEQ ID NO: 97184 - protein, 9 aa, Homo sapiens
  Table A; Target 97184; HLA-B*39:01; TYR; ENSG00000077498; TAA
DALLGGSEI

SEQ ID NO: 97185 - protein, 9 aa, Homo sapiens
  Table A; Target 97185; HLA-B*51:01; TYR; ENSG00000077498; TAA
DALLGGSEI

SEQ ID NO: 97186 - protein, 9 aa, Homo sapiens
  Table A; Target 97186; HLA-C*01:02; TYR; ENSG00000077498; TAA
DALLGGSEI

SEQ ID NO: 97187 - protein, 9 aa, Homo sapiens
  Table A; Target 97187; HLA-C*03:03; TYR; ENSG00000077498; TAA
DALLGGSEI

SEQ ID NO: 97188 - protein, 9 aa, Homo sapiens
  Table A; Target 97188; HLA-C*03:04; TYR; ENSG00000077498; TAA
DALLGGSEI

SEQ ID NO: 97189 - protein, 9 aa, Homo sapiens
  Table A; Target 97189; HLA-C*05:01; TYR; ENSG00000077498; TAA
DALLGGSEI

SEQ ID NO: 97190 - protein, 10 aa, Homo sapiens
  Table A; Target 97190; HLA-A*25:01; TYR; ENSG00000077498; TAA
DALLGGSEIW

SEQ ID NO: 97191 - protein, 11 aa, Homo sapiens
  Table A; Target 97191; HLA-A*33:01; TYR; ENSG00000077498; TAA
DALLGGSEIWR

SEQ ID NO: 97192 - protein, 11 aa, Homo sapiens
  Table A; Target 97192; HLA-A*33:01; TYR; ENSG00000077498; TAA
DASQSSMHNAL

SEQ ID NO: 97193 - protein, 11 aa, Homo sapiens
  Table A; Target 97193; HLA-A*68:01; TYR; ENSG00000077498; TAA
DASQSSMHNAL

SEQ ID NO: 97194 - protein, 11 aa, Homo sapiens
  Table A; Target 97194; HLA-B*35:01; TYR; ENSG00000077498; TAA
DASQSSMHNAL

SEQ ID NO: 97195 - protein, 11 aa, Homo sapiens
  Table A; Target 97195; HLA-B*35:03; TYR; ENSG00000077498; TAA
DASQSSMHNAL

SEQ ID NO: 97196 - protein, 11 aa, Homo sapiens
  Table A; Target 97196; HLA-B*38:01; TYR; ENSG00000077498; TAA
DASQSSMHNAL

SEQ ID NO: 97197 - protein, 8 aa, Homo sapiens
  Table A; Target 97197; HLA-B*18:01; TYR; ENSG00000077498; TAA
DENFTIPY

SEQ ID NO: 97198 - protein, 9 aa, Homo sapiens
  Table A; Target 97198; HLA-B*18:01; TYR; ENSG00000077498; TAA
DENFTIPYW

SEQ ID NO: 97199 - protein, 9 aa, Homo sapiens
  Table A; Target 97199; HLA-B*44:02; TYR; ENSG00000077498; TAA
DENFTIPYW

SEQ ID NO: 97200 - protein, 9 aa, Homo sapiens
  Table A; Target 97200; HLA-B*44:03; TYR; ENSG00000077498; TAA
DENFTIPYW

SEQ ID NO: 97201 - protein, 8 aa, Homo sapiens
  Table A; Target 97201; HLA-B*18:01; TYR; ENSG00000077498; TAA
DEYMGGQH

SEQ ID NO: 97202 - protein, 9 aa, Homo sapiens
  Table A; Target 97202; HLA-B*18:01; TYR; ENSG00000077498; TAA
DEYMGGQHP

SEQ ID NO: 97203 - protein, 9 aa, Homo sapiens
  Table A; Target 97203; HLA-B*40:02; TYR; ENSG00000077498; TAA
DEYMGGQHP

SEQ ID NO: 97204 - protein, 9 aa, Homo sapiens
  Table A; Target 97204; HLA-B*49:01; TYR; ENSG00000077498; TAA
DEYMGGQHP

SEQ ID NO: 97205 - protein, 10 aa, Homo sapiens
  Table A; Target 97205; HLA-A*33:01; TYR; ENSG00000077498; TAA
DEYMGGQHPT

SEQ ID NO: 97206 - protein, 10 aa, Homo sapiens
  Table A; Target 97206; HLA-B*18:01; TYR; ENSG00000077498; TAA
DEYMGGQHPT

SEQ ID NO: 97207 - protein, 10 aa, Homo sapiens
  Table A; Target 97207; HLA-B*27:05; TYR; ENSG00000077498; TAA
DEYMGGQHPT

SEQ ID NO: 97208 - protein, 10 aa, Homo sapiens
  Table A; Target 97208; HLA-B*40:02; TYR; ENSG00000077498; TAA
DEYMGGQHPT

SEQ ID NO: 97209 - protein, 10 aa, Homo sapiens
  Table A; Target 97209; HLA-B*49:01; TYR; ENSG00000077498; TAA
DEYMGGQHPT

SEQ ID NO: 97210 - protein, 10 aa, Homo sapiens
  Table A; Target 97210; HLA-C*04:01; TYR; ENSG00000077498; TAA
DEYMGGQHPT

SEQ ID NO: 97211 - protein, 10 aa, Homo sapiens
  Table A; Target 97211; HLA-C*06:02; TYR; ENSG00000077498; TAA
DEYMGGQHPT

SEQ ID NO: 97212 - protein, 10 aa, Homo sapiens
  Table A; Target 97212; HLA-C*07:01; TYR; ENSG00000077498; TAA
DEYMGGQHPT

SEQ ID NO: 97213 - protein, 10 aa, Homo sapiens
  Table A; Target 97213; HLA-C*07:02; TYR; ENSG00000077498; TAA
DEYMGGQHPT

SEQ ID NO: 97214 - protein, 10 aa, Homo sapiens
  Table A; Target 97214; HLA-C*07:04; TYR; ENSG00000077498; TAA
DEYMGGQHPT

SEQ ID NO: 97215 - protein, 9 aa, Homo sapiens
  Table A; Target 97215; HLA-A*23:01; TYR; ENSG00000077498; TAA
DFAHEAPAF

SEQ ID NO: 97216 - protein, 9 aa, Homo sapiens
  Table A; Target 97216; HLA-A*24:02; TYR; ENSG00000077498; TAA
DFAHEAPAF

SEQ ID NO: 97217 - protein, 9 aa, Homo sapiens
  Table A; Target 97217; HLA-A*25:01; TYR; ENSG00000077498; TAA
DFAHEAPAF

SEQ ID NO: 97218 - protein, 11 aa, Homo sapiens
  Table A; Target 97218; HLA-A*29:02; TYR; ENSG00000077498; TAA
DFFISSKDLGY

SEQ ID NO: 97219 - protein, 9 aa, Homo sapiens
  Table A; Target 97219; HLA-A*33:01; TYR; ENSG00000077498; TAA
DKAANFSFR

SEQ ID NO: 97220 - protein, 8 aa, Homo sapiens
  Table A; Target 97220; HLA-C*07:01; TYR; ENSG00000077498; TAA
DLGYDYSY

SEQ ID NO: 97221 - protein, 8 aa, Homo sapiens
  Table A; Target 97221; HLA-B*35:01; TYR; ENSG00000077498; TAA
DPDSFQDY

SEQ ID NO: 97222 - protein, 8 aa, Homo sapiens
  Table A; Target 97222; HLA-B*55:01; TYR; ENSG00000077498; TAA
DPDSFQDY

SEQ ID NO: 97223 - protein, 8 aa, Homo sapiens
  Table A; Target 97223; HLA-C*03:03; TYR; ENSG00000077498; TAA
DPDSFQDY

SEQ ID NO: 97224 - protein, 9 aa, Homo sapiens
  Table A; Target 97224; HLA-B*38:01; TYR; ENSG00000077498; TAA
DPDSFQDYI

SEQ ID NO: 97225 - protein, 9 aa, Homo sapiens
  Table A; Target 97225; HLA-B*51:01; TYR; ENSG00000077498; TAA
DPDSFQDYI

SEQ ID NO: 97226 - protein, 10 aa, Homo sapiens
  Table A; Target 97226; HLA-B*27:02; TYR; ENSG00000077498; TAA
DPDSFQDYIK

SEQ ID NO: 97227 - protein, 8 aa, Homo sapiens
  Table A; Target 97227; HLA-B*51:01; TYR; ENSG00000077498; TAA
DPIFLLHH

SEQ ID NO: 97228 - protein, 9 aa, Homo sapiens
  Table A; Target 97228; HLA-B*51:01; TYR; ENSG00000077498; TAA
DPIFLLHHA

SEQ ID NO: 97229 - protein, 9 aa, Homo sapiens
  Table A; Target 97229; HLA-B*54:01; TYR; ENSG00000077498; TAA
DPIFLLHHA

SEQ ID NO: 97230 - protein, 9 aa, Homo sapiens
  Table A; Target 97230; HLA-B*56:01; TYR; ENSG00000077498; TAA
DPIFLLHHA

SEQ ID NO: 97231 - protein, 10 aa, Homo sapiens
  Table A; Target 97231; HLA-C*07:01; TYR; ENSG00000077498; TAA
DRESWPSVFY

SEQ ID NO: 97232 - protein, 10 aa, Homo sapiens
  Table A; Target 97232; HLA-A*01:01; TYR; ENSG00000077498; TAA
DSDPDSFQDY

SEQ ID NO: 97233 - protein, 11 aa, Homo sapiens
  Table A; Target 97233; HLA-A*01:01; TYR; ENSG00000077498; TAA
DSDPDSFQDYI

SEQ ID NO: 97234 - protein, 9 aa, Homo sapiens
  Table A; Target 97234; HLA-A*33:01; TYR; ENSG00000077498; TAA
DSFQDYIKS

SEQ ID NO: 97235 - protein, 10 aa, Homo sapiens
  Table A; Target 97235; HLA-A*25:01; TYR; ENSG00000077498; TAA
DSFQDYIKSY

SEQ ID NO: 97236 - protein, 10 aa, Homo sapiens
  Table A; Target 97236; HLA-A*26:01; TYR; ENSG00000077498; TAA
DSFQDYIKSY

SEQ ID NO: 97237 - protein, 10 aa, Homo sapiens
  Table A; Target 97237; HLA-A*33:01; TYR; ENSG00000077498; TAA
DSFQDYIKSY

SEQ ID NO: 97238 - protein, 10 aa, Homo sapiens
  Table A; Target 97238; HLA-B*18:01; TYR; ENSG00000077498; TAA
DSFQDYIKSY

SEQ ID NO: 97239 - protein, 10 aa, Homo sapiens
  Table A; Target 97239; HLA-B*44:02; TYR; ENSG00000077498; TAA
DSFQDYIKSY

SEQ ID NO: 97240 - protein, 9 aa, Homo sapiens
  Table A; Target 97240; HLA-A*33:01; TYR; ENSG00000077498; TAA
DSIFEQWLR

SEQ ID NO: 97241 - protein, 9 aa, Homo sapiens
  Table A; Target 97241; HLA-A*33:01; TYR; ENSG00000077498; TAA
DYHSLYQSH

SEQ ID NO: 97242 - protein, 10 aa, Homo sapiens
  Table A; Target 97242; HLA-A*33:01; TYR; ENSG00000077498; TAA
DYHSLYQSHL

SEQ ID NO: 97243 - protein, 9 aa, Homo sapiens
  Table A; Target 97243; HLA-A*33:01; TYR; ENSG00000077498; TAA
DYIKSYLEQ

SEQ ID NO: 97244 - protein, 8 aa, Homo sapiens
  Table A; Target 97244; HLA-C*07:01; TYR; ENSG00000077498; TAA
DYVIPIGT

SEQ ID NO: 97245 - protein, 9 aa, Homo sapiens
  Table A; Target 97245; HLA-A*23:01; TYR; ENSG00000077498; TAA
DYVIPIGTY

SEQ ID NO: 97246 - protein, 9 aa, Homo sapiens
  Table A; Target 97246; HLA-A*24:02; TYR; ENSG00000077498; TAA
DYVIPIGTY

SEQ ID NO: 97247 - protein, 9 aa, Homo sapiens
  Table A; Target 97247; HLA-A*25:01; TYR; ENSG00000077498; TAA
DYVIPIGTY

SEQ ID NO: 97248 - protein, 9 aa, Homo sapiens
  Table A; Target 97248; HLA-A*26:01; TYR; ENSG00000077498; TAA
DYVIPIGTY

SEQ ID NO: 97249 - protein, 9 aa, Homo sapiens
  Table A; Target 97249; HLA-A*29:02; TYR; ENSG00000077498; TAA
DYVIPIGTY

SEQ ID NO: 97250 - protein, 9 aa, Homo sapiens
  Table A; Target 97250; HLA-A*30:02; TYR; ENSG00000077498; TAA
DYVIPIGTY

SEQ ID NO: 97251 - protein, 9 aa, Homo sapiens
  Table A; Target 97251; HLA-A*33:01; TYR; ENSG00000077498; TAA
DYVIPIGTY

SEQ ID NO: 97252 - protein, 9 aa, Homo sapiens
  Table A; Target 97252; HLA-A*33:03; TYR; ENSG00000077498; TAA
DYVIPIGTY

SEQ ID NO: 97253 - protein, 9 aa, Homo sapiens
  Table A; Target 97253; HLA-B*15:01; TYR; ENSG00000077498; TAA
DYVIPIGTY

SEQ ID NO: 97254 - protein, 9 aa, Homo sapiens
  Table A; Target 97254; HLA-B*15:03; TYR; ENSG00000077498; TAA
DYVIPIGTY

SEQ ID NO: 97255 - protein, 9 aa, Homo sapiens
  Table A; Target 97255; HLA-B*18:01; TYR; ENSG00000077498; TAA
DYVIPIGTY

SEQ ID NO: 97256 - protein, 9 aa, Homo sapiens
  Table A; Target 97256; HLA-B*27:05; TYR; ENSG00000077498; TAA
DYVIPIGTY

SEQ ID NO: 97257 - protein, 9 aa, Homo sapiens
  Table A; Target 97257; HLA-B*35:01; TYR; ENSG00000077498; TAA
DYVIPIGTY

SEQ ID NO: 97258 - protein, 9 aa, Homo sapiens
  Table A; Target 97258; HLA-B*40:02; TYR; ENSG00000077498; TAA
DYVIPIGTY

SEQ ID NO: 97259 - protein, 9 aa, Homo sapiens
  Table A; Target 97259; HLA-B*46:01; TYR; ENSG00000077498; TAA
DYVIPIGTY

SEQ ID NO: 97260 - protein, 9 aa, Homo sapiens
  Table A; Target 97260; HLA-C*01:02; TYR; ENSG00000077498; TAA
DYVIPIGTY

SEQ ID NO: 97261 - protein, 9 aa, Homo sapiens
  Table A; Target 97261; HLA-C*04:01; TYR; ENSG00000077498; TAA
DYVIPIGTY

SEQ ID NO: 97262 - protein, 9 aa, Homo sapiens
  Table A; Target 97262; HLA-C*07:01; TYR; ENSG00000077498; TAA
DYVIPIGTY

SEQ ID NO: 97263 - protein, 9 aa, Homo sapiens
  Table A; Target 97263; HLA-C*07:02; TYR; ENSG00000077498; TAA
DYVIPIGTY

SEQ ID NO: 97264 - protein, 9 aa, Homo sapiens
  Table A; Target 97264; HLA-C*14:02; TYR; ENSG00000077498; TAA
DYVIPIGTY

SEQ ID NO: 97265 - protein, 10 aa, Homo sapiens
  Table A; Target 97265; HLA-A*29:02; TYR; ENSG00000077498; TAA
DYVIPIGTYG

SEQ ID NO: 97266 - protein, 10 aa, Homo sapiens
  Table A; Target 97266; HLA-C*04:01; TYR; ENSG00000077498; TAA
DYVIPIGTYG

SEQ ID NO: 97267 - protein, 10 aa, Homo sapiens
  Table A; Target 97267; HLA-C*07:01; TYR; ENSG00000077498; TAA
DYVIPIGTYG

SEQ ID NO: 97268 - protein, 8 aa, Homo sapiens
  Table A; Target 97268; HLA-A*33:01; TYR; ENSG00000077498; TAA
EANAPIGH

SEQ ID NO: 97269 - protein, 10 aa, Homo sapiens
  Table A; Target 97269; HLA-A*26:01; TYR; ENSG00000077498; TAA
EANAPIGHNR

SEQ ID NO: 97270 - protein, 10 aa, Homo sapiens
  Table A; Target 97270; HLA-A*31:01; TYR; ENSG00000077498; TAA
EANAPIGHNR

SEQ ID NO: 97271 - protein, 10 aa, Homo sapiens
  Table A; Target 97271; HLA-A*33:01; TYR; ENSG00000077498; TAA
EANAPIGHNR

SEQ ID NO: 97272 - protein, 10 aa, Homo sapiens
  Table A; Target 97272; HLA-A*33:03; TYR; ENSG00000077498; TAA
EANAPIGHNR

SEQ ID NO: 97273 - protein, 10 aa, Homo sapiens
  Table A; Target 97273; HLA-A*68:01; TYR; ENSG00000077498; TAA
EANAPIGHNR

SEQ ID NO: 97274 - protein, 10 aa, Homo sapiens
  Table A; Target 97274; HLA-A*68:02; TYR; ENSG00000077498; TAA
EANAPIGHNR

SEQ ID NO: 97275 - protein, 10 aa, Homo sapiens
  Table A; Target 97275; HLA-C*07:06; TYR; ENSG00000077498; TAA
EANAPIGHNR

SEQ ID NO: 97276 - protein, 10 aa, Homo sapiens
  Table A; Target 97276; HLA-A*68:02; TYR; ENSG00000077498; TAA
EAPAFLPWHR

SEQ ID NO: 97277 - protein, 8 aa, Homo sapiens
  Table A; Target 97277; HLA-C*07:01; TYR; ENSG00000077498; TAA
EDYHSLYQ

SEQ ID NO: 97278 - protein, 9 aa, Homo sapiens
  Table A; Target 97278; HLA-A*33:01; TYR; ENSG00000077498; TAA
EDYHSLYQS

SEQ ID NO: 97279 - protein, 11 aa, Homo sapiens
  Table A; Target 97279; HLA-A*68:02; TYR; ENSG00000077498; TAA
EDYHSLYQSHL

SEQ ID NO: 97280 - protein, 8 aa, Homo sapiens
  Table A; Target 97280; HLA-B*18:01; TYR; ENSG00000077498; TAA
EEKQPLLM

SEQ ID NO: 97281 - protein, 9 aa, Homo sapiens
  Table A; Target 97281; HLA-A*23:01; TYR; ENSG00000077498; TAA
EEYNSHQSL

SEQ ID NO: 97282 - protein, 9 aa, Homo sapiens
  Table A; Target 97282; HLA-A*24:02; TYR; ENSG00000077498; TAA
EEYNSHQSL

SEQ ID NO: 97283 - protein, 9 aa, Homo sapiens
  Table A; Target 97283; HLA-A*25:01; TYR; ENSG00000077498; TAA
EEYNSHQSL

SEQ ID NO: 97284 - protein, 9 aa, Homo sapiens
  Table A; Target 97284; HLA-A*26:01; TYR; ENSG00000077498; TAA
EEYNSHQSL

SEQ ID NO: 97285 - protein, 9 aa, Homo sapiens
  Table A; Target 97285; HLA-A*30:01; TYR; ENSG00000077498; TAA
EEYNSHQSL

SEQ ID NO: 97286 - protein, 9 aa, Homo sapiens
  Table A; Target 97286; HLA-A*32:01; TYR; ENSG00000077498; TAA
EEYNSHQSL

SEQ ID NO: 97287 - protein, 9 aa, Homo sapiens
  Table A; Target 97287; HLA-A*33:03; TYR; ENSG00000077498; TAA
EEYNSHQSL

SEQ ID NO: 97288 - protein, 9 aa, Homo sapiens
  Table A; Target 97288; HLA-A*68:02; TYR; ENSG00000077498; TAA
EEYNSHQSL

SEQ ID NO: 97289 - protein, 9 aa, Homo sapiens
  Table A; Target 97289; HLA-B*07:02; TYR; ENSG00000077498; TAA
EEYNSHQSL

SEQ ID NO: 97290 - protein, 9 aa, Homo sapiens
  Table A; Target 97290; HLA-B*08:01; TYR; ENSG00000077498; TAA
EEYNSHQSL

SEQ ID NO: 97291 - protein, 9 aa, Homo sapiens
  Table A; Target 97291; HLA-B*13:02; TYR; ENSG00000077498; TAA
EEYNSHQSL

SEQ ID NO: 97292 - protein, 9 aa, Homo sapiens
  Table A; Target 97292; HLA-B*15:03; TYR; ENSG00000077498; TAA
EEYNSHQSL

SEQ ID NO: 97293 - protein, 9 aa, Homo sapiens
  Table A; Target 97293; HLA-B*18:01; TYR; ENSG00000077498; TAA
EEYNSHQSL

SEQ ID NO: 97294 - protein, 9 aa, Homo sapiens
  Table A; Target 97294; HLA-B*27:02; TYR; ENSG00000077498; TAA
EEYNSHQSL

SEQ ID NO: 97295 - protein, 9 aa, Homo sapiens
  Table A; Target 97295; HLA-B*27:05; TYR; ENSG00000077498; TAA
EEYNSHQSL

SEQ ID NO: 97296 - protein, 9 aa, Homo sapiens
  Table A; Target 97296; HLA-B*37:01; TYR; ENSG00000077498; TAA
EEYNSHQSL

SEQ ID NO: 97297 - protein, 9 aa, Homo sapiens
  Table A; Target 97297; HLA-B*38:01; TYR; ENSG00000077498; TAA
EEYNSHQSL

SEQ ID NO: 97298 - protein, 9 aa, Homo sapiens
  Table A; Target 97298; HLA-B*39:01; TYR; ENSG00000077498; TAA
EEYNSHQSL

SEQ ID NO: 97299 - protein, 9 aa, Homo sapiens
  Table A; Target 97299; HLA-B*40:01; TYR; ENSG00000077498; TAA
EEYNSHQSL

SEQ ID NO: 97300 - protein, 9 aa, Homo sapiens
  Table A; Target 97300; HLA-B*40:02; TYR; ENSG00000077498; TAA
EEYNSHQSL

SEQ ID NO: 97301 - protein, 9 aa, Homo sapiens
  Table A; Target 97301; HLA-B*44:02; TYR; ENSG00000077498; TAA
EEYNSHQSL

SEQ ID NO: 97302 - protein, 9 aa, Homo sapiens
  Table A; Target 97302; HLA-B*44:03; TYR; ENSG00000077498; TAA
EEYNSHQSL

SEQ ID NO: 97303 - protein, 9 aa, Homo sapiens
  Table A; Target 97303; HLA-B*49:01; TYR; ENSG00000077498; TAA
EEYNSHQSL

SEQ ID NO: 97304 - protein, 9 aa, Homo sapiens
  Table A; Target 97304; HLA-B*51:01; TYR; ENSG00000077498; TAA
EEYNSHQSL

SEQ ID NO: 97305 - protein, 9 aa, Homo sapiens
  Table A; Target 97305; HLA-C*02:02; TYR; ENSG00000077498; TAA
EEYNSHQSL

SEQ ID NO: 97306 - protein, 9 aa, Homo sapiens
  Table A; Target 97306; HLA-C*03:03; TYR; ENSG00000077498; TAA
EEYNSHQSL

SEQ ID NO: 97307 - protein, 9 aa, Homo sapiens
  Table A; Target 97307; HLA-C*03:04; TYR; ENSG00000077498; TAA
EEYNSHQSL

SEQ ID NO: 97308 - protein, 9 aa, Homo sapiens
  Table A; Target 97308; HLA-C*06:02; TYR; ENSG00000077498; TAA
EEYNSHQSL

SEQ ID NO: 97309 - protein, 9 aa, Homo sapiens
  Table A; Target 97309; HLA-C*07:01; TYR; ENSG00000077498; TAA
EEYNSHQSL

SEQ ID NO: 97310 - protein, 9 aa, Homo sapiens
  Table A; Target 97310; HLA-C*07:04; TYR; ENSG00000077498; TAA
EEYNSHQSL

SEQ ID NO: 97311 - protein, 9 aa, Homo sapiens
  Table A; Target 97311; HLA-C*12:03; TYR; ENSG00000077498; TAA
EEYNSHQSL

SEQ ID NO: 97312 - protein, 9 aa, Homo sapiens
  Table A; Target 97312; HLA-C*14:02; TYR; ENSG00000077498; TAA
EEYNSHQSL

SEQ ID NO: 97313 - protein, 9 aa, Homo sapiens
  Table A; Target 97313; HLA-C*16:01; TYR; ENSG00000077498; TAA
EEYNSHQSL

SEQ ID NO: 97314 - protein, 9 aa, Homo sapiens
  Table A; Target 97314; HLA-C*16:02; TYR; ENSG00000077498; TAA
EEYNSHQSL

SEQ ID NO: 97315 - protein, 9 aa, Homo sapiens
  Table A; Target 97315; HLA-C*16:04; TYR; ENSG00000077498; TAA
EEYNSHQSL

SEQ ID NO: 97316 - protein, 10 aa, Homo sapiens
  Table A; Target 97316; HLA-B*49:01; TYR; ENSG00000077498; TAA
EEYNSHQSLC

SEQ ID NO: 97317 - protein, 9 aa, Homo sapiens
  Table A; Target 97317; HLA-C*07:01; TYR; ENSG00000077498; TAA
EFCLSLTQY

SEQ ID NO: 97318 - protein, 9 aa, Homo sapiens
  Table A; Target 97318; HLA-C*07:01; TYR; ENSG00000077498; TAA
EGFASPLTG

SEQ ID NO: 97319 - protein, 9 aa, Homo sapiens
  Table A; Target 97319; HLA-C*12:03; TYR; ENSG00000077498; TAA
EGFASPLTG

SEQ ID NO: 97320 - protein, 10 aa, Homo sapiens
  Table A; Target 97320; HLA-A*25:01; TYR; ENSG00000077498; TAA
EGFASPLTGI

SEQ ID NO: 97321 - protein, 10 aa, Homo sapiens
  Table A; Target 97321; HLA-A*68:02; TYR; ENSG00000077498; TAA
EGFASPLTGI

SEQ ID NO: 97322 - protein, 10 aa, Homo sapiens
  Table A; Target 97322; HLA-B*07:02; TYR; ENSG00000077498; TAA
EGFASPLTGI

SEQ ID NO: 97323 - protein, 10 aa, Homo sapiens
  Table A; Target 97323; HLA-B*51:01; TYR; ENSG00000077498; TAA
EGFASPLTGI

SEQ ID NO: 97324 - protein, 10 aa, Homo sapiens
  Table A; Target 97324; HLA-C*07:01; TYR; ENSG00000077498; TAA
EGFASPLTGI

SEQ ID NO: 97325 - protein, 9 aa, Homo sapiens
  Table A; Target 97325; HLA-A*24:02; TYR; ENSG00000077498; TAA
EQASRIWSW

SEQ ID NO: 97326 - protein, 9 aa, Homo sapiens
  Table A; Target 97326; HLA-A*25:01; TYR; ENSG00000077498; TAA
EQASRIWSW

SEQ ID NO: 97327 - protein, 9 aa, Homo sapiens
  Table A; Target 97327; HLA-A*26:01; TYR; ENSG00000077498; TAA
EQASRIWSW

SEQ ID NO: 97328 - protein, 9 aa, Homo sapiens
  Table A; Target 97328; HLA-B*44:02; TYR; ENSG00000077498; TAA
EQASRIWSW

SEQ ID NO: 97329 - protein, 9 aa, Homo sapiens
  Table A; Target 97329; HLA-B*44:03; TYR; ENSG00000077498; TAA
EQASRIWSW

SEQ ID NO: 97330 - protein, 8 aa, Homo sapiens
  Table A; Target 97330; HLA-C*07:01; TYR; ENSG00000077498; TAA
ESWPSVFY

SEQ ID NO: 97331 - protein, 10 aa, Homo sapiens
  Table A; Target 97331; HLA-A*31:01; TYR; ENSG00000077498; TAA
ESWPSVFYNR

SEQ ID NO: 97332 - protein, 10 aa, Homo sapiens
  Table A; Target 97332; HLA-A*33:01; TYR; ENSG00000077498; TAA
ESWPSVFYNR

SEQ ID NO: 97333 - protein, 10 aa, Homo sapiens
  Table A; Target 97333; HLA-A*33:03; TYR; ENSG00000077498; TAA
ESWPSVFYNR

SEQ ID NO: 97334 - protein, 10 aa, Homo sapiens
  Table A; Target 97334; HLA-A*68:02; TYR; ENSG00000077498; TAA
ESWPSVFYNR

SEQ ID NO: 97335 - protein, 10 aa, Homo sapiens
  Table A; Target 97335; HLA-B*57:01; TYR; ENSG00000077498; TAA
ESWPSVFYNR

SEQ ID NO: 97336 - protein, 8 aa, Homo sapiens
  Table A; Target 97336; HLA-B*51:01; TYR; ENSG00000077498; TAA
ESYMVPFI

SEQ ID NO: 97337 - protein, 10 aa, Homo sapiens
  Table A; Target 97337; HLA-A*68:02; TYR; ENSG00000077498; TAA
ESYMVPFIPL

SEQ ID NO: 97338 - protein, 9 aa, Homo sapiens
  Table A; Target 97338; HLA-A*25:01; TYR; ENSG00000077498; TAA
EVYPEANAP

SEQ ID NO: 97339 - protein, 9 aa, Homo sapiens
  Table A; Target 97339; HLA-A*26:01; TYR; ENSG00000077498; TAA
EVYPEANAP

SEQ ID NO: 97340 - protein, 10 aa, Homo sapiens
  Table A; Target 97340; HLA-A*25:01; TYR; ENSG00000077498; TAA
EVYPEANAPI

SEQ ID NO: 97341 - protein, 10 aa, Homo sapiens
  Table A; Target 97341; HLA-A*26:01; TYR; ENSG00000077498; TAA
EVYPEANAPI

SEQ ID NO: 97342 - protein, 10 aa, Homo sapiens
  Table A; Target 97342; HLA-A*33:01; TYR; ENSG00000077498; TAA
EVYPEANAPI

SEQ ID NO: 97343 - protein, 10 aa, Homo sapiens
  Table A; Target 97343; HLA-A*33:03; TYR; ENSG00000077498; TAA
EVYPEANAPI

SEQ ID NO: 97344 - protein, 10 aa, Homo sapiens
  Table A; Target 97344; HLA-A*68:01; TYR; ENSG00000077498; TAA
EVYPEANAPI

SEQ ID NO: 97345 - protein, 10 aa, Homo sapiens
  Table A; Target 97345; HLA-A*68:02; TYR; ENSG00000077498; TAA
EVYPEANAPI

SEQ ID NO: 97346 - protein, 10 aa, Homo sapiens
  Table A; Target 97346; HLA-B*39:01; TYR; ENSG00000077498; TAA
EVYPEANAPI

SEQ ID NO: 97347 - protein, 10 aa, Homo sapiens
  Table A; Target 97347; HLA-C*03:03; TYR; ENSG00000077498; TAA
EVYPEANAPI

SEQ ID NO: 97348 - protein, 10 aa, Homo sapiens
  Table A; Target 97348; HLA-C*07:04; TYR; ENSG00000077498; TAA
EVYPEANAPI

SEQ ID NO: 97349 - protein, 10 aa, Homo sapiens
  Table A; Target 97349; HLA-C*07:06; TYR; ENSG00000077498; TAA
EVYPEANAPI

SEQ ID NO: 97350 - protein, 11 aa, Homo sapiens
  Table A; Target 97350; HLA-A*26:01; TYR; ENSG00000077498; TAA
EVYPEANAPIG

SEQ ID NO: 97351 - protein, 9 aa, Homo sapiens
  Table A; Target 97351; HLA-A*33:03; TYR; ENSG00000077498; TAA
EYMGGQHPT

SEQ ID NO: 97352 - protein, 10 aa, Homo sapiens
  Table A; Target 97352; HLA-A*33:03; TYR; ENSG00000077498; TAA
EYMGGQHPTN

SEQ ID NO: 97353 - protein, 8 aa, Homo sapiens
  Table A; Target 97353; HLA-A*23:01; TYR; ENSG00000077498; TAA
EYNSHQSL

SEQ ID NO: 97354 - protein, 8 aa, Homo sapiens
  Table A; Target 97354; HLA-A*24:02; TYR; ENSG00000077498; TAA
EYNSHQSL

SEQ ID NO: 97355 - protein, 8 aa, Homo sapiens
  Table A; Target 97355; HLA-A*33:01; TYR; ENSG00000077498; TAA
EYNSHQSL

SEQ ID NO: 97356 - protein, 8 aa, Homo sapiens
  Table A; Target 97356; HLA-A*33:03; TYR; ENSG00000077498; TAA
EYNSHQSL

SEQ ID NO: 97357 - protein, 8 aa, Homo sapiens
  Table A; Target 97357; HLA-B*08:01; TYR; ENSG00000077498; TAA
EYNSHQSL

SEQ ID NO: 97358 - protein, 8 aa, Homo sapiens
  Table A; Target 97358; HLA-C*01:02; TYR; ENSG00000077498; TAA
EYNSHQSL

SEQ ID NO: 97359 - protein, 8 aa, Homo sapiens
  Table A; Target 97359; HLA-C*04:01; TYR; ENSG00000077498; TAA
EYNSHQSL

SEQ ID NO: 97360 - protein, 8 aa, Homo sapiens
  Table A; Target 97360; HLA-C*07:01; TYR; ENSG00000077498; TAA
EYNSHQSL

SEQ ID NO: 97361 - protein, 8 aa, Homo sapiens
  Table A; Target 97361; HLA-C*07:02; TYR; ENSG00000077498; TAA
EYNSHQSL

SEQ ID NO: 97362 - protein, 8 aa, Homo sapiens
  Table A; Target 97362; HLA-C*14:02; TYR; ENSG00000077498; TAA
EYNSHQSL

SEQ ID NO: 97363 - protein, 8 aa, Homo sapiens
  Table A; Target 97363; HLA-A*26:01; TYR; ENSG00000077498; TAA
FAHEAPAF

SEQ ID NO: 97364 - protein, 8 aa, Homo sapiens
  Table A; Target 97364; HLA-B*15:03; TYR; ENSG00000077498; TAA
FAHEAPAF

SEQ ID NO: 97365 - protein, 8 aa, Homo sapiens
  Table A; Target 97365; HLA-B*18:01; TYR; ENSG00000077498; TAA
FAHEAPAF

SEQ ID NO: 97366 - protein, 8 aa, Homo sapiens
  Table A; Target 97366; HLA-B*35:01; TYR; ENSG00000077498; TAA
FAHEAPAF

SEQ ID NO: 97367 - protein, 8 aa, Homo sapiens
  Table A; Target 97367; HLA-B*39:01; TYR; ENSG00000077498; TAA
FAHEAPAF

SEQ ID NO: 97368 - protein, 8 aa, Homo sapiens
  Table A; Target 97368; HLA-B*46:01; TYR; ENSG00000077498; TAA
FAHEAPAF

SEQ ID NO: 97369 - protein, 8 aa, Homo sapiens
  Table A; Target 97369; HLA-B*51:01; TYR; ENSG00000077498; TAA
FAHEAPAF

SEQ ID NO: 97370 - protein, 8 aa, Homo sapiens
  Table A; Target 97370; HLA-B*54:01; TYR; ENSG00000077498; TAA
FAHEAPAF

SEQ ID NO: 97371 - protein, 8 aa, Homo sapiens
  Table A; Target 97371; HLA-B*58:01; TYR; ENSG00000077498; TAA
FAHEAPAF

SEQ ID NO: 97372 - protein, 8 aa, Homo sapiens
  Table A; Target 97372; HLA-C*01:02; TYR; ENSG00000077498; TAA
FAHEAPAF

SEQ ID NO: 97373 - protein, 8 aa, Homo sapiens
  Table A; Target 97373; HLA-C*02:02; TYR; ENSG00000077498; TAA
FAHEAPAF

SEQ ID NO: 97374 - protein, 8 aa, Homo sapiens
  Table A; Target 97374; HLA-C*03:03; TYR; ENSG00000077498; TAA
FAHEAPAF

SEQ ID NO: 97375 - protein, 8 aa, Homo sapiens
  Table A; Target 97375; HLA-C*03:04; TYR; ENSG00000077498; TAA
FAHEAPAF

SEQ ID NO: 97376 - protein, 8 aa, Homo sapiens
  Table A; Target 97376; HLA-C*05:01; TYR; ENSG00000077498; TAA
FAHEAPAF

SEQ ID NO: 97377 - protein, 8 aa, Homo sapiens
  Table A; Target 97377; HLA-C*14:02; TYR; ENSG00000077498; TAA
FAHEAPAF

SEQ ID NO: 97378 - protein, 8 aa, Homo sapiens
  Table A; Target 97378; HLA-C*16:01; TYR; ENSG00000077498; TAA
FAHEAPAF

SEQ ID NO: 97379 - protein, 8 aa, Homo sapiens
  Table A; Target 97379; HLA-C*16:02; TYR; ENSG00000077498; TAA
FAHEAPAF

SEQ ID NO: 97380 - protein, 8 aa, Homo sapiens
  Table A; Target 97380; HLA-C*16:04; TYR; ENSG00000077498; TAA
FAHEAPAF

SEQ ID NO: 97381 - protein, 9 aa, Homo sapiens
  Table A; Target 97381; HLA-A*01:01; TYR; ENSG00000077498; TAA
FAHEAPAFL

SEQ ID NO: 97382 - protein, 9 aa, Homo sapiens
  Table A; Target 97382; HLA-A*02:03; TYR; ENSG00000077498; TAA
FAHEAPAFL

SEQ ID NO: 97383 - protein, 9 aa, Homo sapiens
  Table A; Target 97383; HLA-A*02:07; TYR; ENSG00000077498; TAA
FAHEAPAFL

SEQ ID NO: 97384 - protein, 9 aa, Homo sapiens
  Table A; Target 97384; HLA-A*68:02; TYR; ENSG00000077498; TAA
FAHEAPAFL

SEQ ID NO: 97385 - protein, 9 aa, Homo sapiens
  Table A; Target 97385; HLA-B*35:03; TYR; ENSG00000077498; TAA
FAHEAPAFL

SEQ ID NO: 97386 - protein, 9 aa, Homo sapiens
  Table A; Target 97386; HLA-B*46:01; TYR; ENSG00000077498; TAA
FAHEAPAFL

SEQ ID NO: 97387 - protein, 9 aa, Homo sapiens
  Table A; Target 97387; HLA-B*51:01; TYR; ENSG00000077498; TAA
FAHEAPAFL

SEQ ID NO: 97388 - protein, 9 aa, Homo sapiens
  Table A; Target 97388; HLA-B*54:01; TYR; ENSG00000077498; TAA
FAHEAPAFL

SEQ ID NO: 97389 - protein, 9 aa, Homo sapiens
  Table A; Target 97389; HLA-C*02:02; TYR; ENSG00000077498; TAA
FAHEAPAFL

SEQ ID NO: 97390 - protein, 9 aa, Homo sapiens
  Table A; Target 97390; HLA-C*03:03; TYR; ENSG00000077498; TAA
FAHEAPAFL

SEQ ID NO: 97391 - protein, 9 aa, Homo sapiens
  Table A; Target 97391; HLA-C*03:04; TYR; ENSG00000077498; TAA
FAHEAPAFL

SEQ ID NO: 97392 - protein, 9 aa, Homo sapiens
  Table A; Target 97392; HLA-C*05:01; TYR; ENSG00000077498; TAA
FAHEAPAFL

SEQ ID NO: 97393 - protein, 9 aa, Homo sapiens
  Table A; Target 97393; HLA-C*16:04; TYR; ENSG00000077498; TAA
FAHEAPAFL

SEQ ID NO: 97394 - protein, 8 aa, Homo sapiens
  Table A; Target 97394; HLA-B*13:02; TYR; ENSG00000077498; TAA
FASPLTGI

SEQ ID NO: 97395 - protein, 8 aa, Homo sapiens
  Table A; Target 97395; HLA-B*49:01; TYR; ENSG00000077498; TAA
FASPLTGI

SEQ ID NO: 97396 - protein, 8 aa, Homo sapiens
  Table A; Target 97396; HLA-B*51:01; TYR; ENSG00000077498; TAA
FASPLTGI

SEQ ID NO: 97397 - protein, 8 aa, Homo sapiens
  Table A; Target 97397; HLA-B*54:01; TYR; ENSG00000077498; TAA
FASPLTGI

SEQ ID NO: 97398 - protein, 8 aa, Homo sapiens
  Table A; Target 97398; HLA-C*02:02; TYR; ENSG00000077498; TAA
FASPLTGI

SEQ ID NO: 97399 - protein, 8 aa, Homo sapiens
  Table A; Target 97399; HLA-C*16:02; TYR; ENSG00000077498; TAA
FASPLTGI

SEQ ID NO: 97400 - protein, 9 aa, Homo sapiens
  Table A; Target 97400; HLA-B*46:01; TYR; ENSG00000077498; TAA
FASPLTGIA

SEQ ID NO: 97401 - protein, 9 aa, Homo sapiens
  Table A; Target 97401; HLA-B*54:01; TYR; ENSG00000077498; TAA
FASPLTGIA

SEQ ID NO: 97402 - protein, 9 aa, Homo sapiens
  Table A; Target 97402; HLA-B*56:01; TYR; ENSG00000077498; TAA
FASPLTGIA

SEQ ID NO: 97403 - protein, 9 aa, Homo sapiens
  Table A; Target 97403; HLA-C*02:02; TYR; ENSG00000077498; TAA
FASPLTGIA

SEQ ID NO: 97404 - protein, 9 aa, Homo sapiens
  Table A; Target 97404; HLA-C*03:03; TYR; ENSG00000077498; TAA
FASPLTGIA

SEQ ID NO: 97405 - protein, 9 aa, Homo sapiens
  Table A; Target 97405; HLA-C*03:04; TYR; ENSG00000077498; TAA
FASPLTGIA

SEQ ID NO: 97406 - protein, 9 aa, Homo sapiens
  Table A; Target 97406; HLA-C*06:02; TYR; ENSG00000077498; TAA
FASPLTGIA

SEQ ID NO: 97407 - protein, 9 aa, Homo sapiens
  Table A; Target 97407; HLA-C*12:03; TYR; ENSG00000077498; TAA
FASPLTGIA

SEQ ID NO: 97408 - protein, 9 aa, Homo sapiens
  Table A; Target 97408; HLA-C*16:02; TYR; ENSG00000077498; TAA
FASPLTGIA

SEQ ID NO: 97409 - protein, 9 aa, Homo sapiens
  Table A; Target 97409; HLA-C*16:04; TYR; ENSG00000077498; TAA
FASPLTGIA

SEQ ID NO: 97410 - protein, 11 aa, Homo sapiens
  Table A; Target 97410; HLA-B*54:01; TYR; ENSG00000077498; TAA
FASPLTGIADA

SEQ ID NO: 97411 - protein, 8 aa, Homo sapiens
  Table A; Target 97411; HLA-B*51:01; TYR; ENSG00000077498; TAA
FAYLTLAK

SEQ ID NO: 97412 - protein, 8 aa, Homo sapiens
  Table A; Target 97412; HLA-B*54:01; TYR; ENSG00000077498; TAA
FAYLTLAK

SEQ ID NO: 97413 - protein, 11 aa, Homo sapiens
  Table A; Target 97413; HLA-B*51:01; TYR; ENSG00000077498; TAA
FAYLTLAKHTI

SEQ ID NO: 97414 - protein, 11 aa, Homo sapiens
  Table A; Target 97414; HLA-B*54:01; TYR; ENSG00000077498; TAA
FAYLTLAKHTI

SEQ ID NO: 97415 - protein, 8 aa, Homo sapiens
  Table A; Target 97415; HLA-A*03:02; TYR; ENSG00000077498; TAA
FDLSAPEK

SEQ ID NO: 97416 - protein, 8 aa, Homo sapiens
  Table A; Target 97416; HLA-A*11:01; TYR; ENSG00000077498; TAA
FDLSAPEK

SEQ ID NO: 97417 - protein, 8 aa, Homo sapiens
  Table A; Target 97417; HLA-B*27:02; TYR; ENSG00000077498; TAA
FDLSAPEK

SEQ ID NO: 97418 - protein, 8 aa, Homo sapiens
  Table A; Target 97418; HLA-B*27:05; TYR; ENSG00000077498; TAA
FDLSAPEK

SEQ ID NO: 97419 - protein, 8 aa, Homo sapiens
  Table A; Target 97419; HLA-C*07:01; TYR; ENSG00000077498; TAA
FDLSAPEK

SEQ ID NO: 97420 - protein, 8 aa, Homo sapiens
  Table A; Target 97420; HLA-C*07:02; TYR; ENSG00000077498; TAA
FDLSAPEK

SEQ ID NO: 97421 - protein, 8 aa, Homo sapiens
  Table A; Target 97421; HLA-C*12:03; TYR; ENSG00000077498; TAA
FDLSAPEK

SEQ ID NO: 97422 - protein, 9 aa, Homo sapiens
  Table A; Target 97422; HLA-A*29:02; TYR; ENSG00000077498; TAA
FFAYLTLAK

SEQ ID NO: 97423 - protein, 8 aa, Homo sapiens
  Table A; Target 97423; HLA-C*14:02; TYR; ENSG00000077498; TAA
FFISSKDL

SEQ ID NO: 97424 - protein, 10 aa, Homo sapiens
  Table A; Target 97424; HLA-A*29:02; TYR; ENSG00000077498; TAA
FFISSKDLGY

SEQ ID NO: 97425 - protein, 10 aa, Homo sapiens
  Table A; Target 97425; HLA-C*14:02; TYR; ENSG00000077498; TAA
FFISSKDLGY

SEQ ID NO: 97426 - protein, 9 aa, Homo sapiens
  Table A; Target 97426; HLA-A*01:01; TYR; ENSG00000077498; TAA
FISSKDLGY

SEQ ID NO: 97427 - protein, 9 aa, Homo sapiens
  Table A; Target 97427; HLA-A*03:01; TYR; ENSG00000077498; TAA
FISSKDLGY

SEQ ID NO: 97428 - protein, 9 aa, Homo sapiens
  Table A; Target 97428; HLA-A*26:01; TYR; ENSG00000077498; TAA
FISSKDLGY

SEQ ID NO: 97429 - protein, 9 aa, Homo sapiens
  Table A; Target 97429; HLA-A*29:02; TYR; ENSG00000077498; TAA
FISSKDLGY

SEQ ID NO: 97430 - protein, 9 aa, Homo sapiens
  Table A; Target 97430; HLA-A*32:01; TYR; ENSG00000077498; TAA
FISSKDLGY

SEQ ID NO: 97431 - protein, 9 aa, Homo sapiens
  Table A; Target 97431; HLA-B*15:01; TYR; ENSG00000077498; TAA
FISSKDLGY

SEQ ID NO: 97432 - protein, 9 aa, Homo sapiens
  Table A; Target 97432; HLA-B*46:01; TYR; ENSG00000077498; TAA
FISSKDLGY

SEQ ID NO: 97433 - protein, 9 aa, Homo sapiens
  Table A; Target 97433; HLA-C*02:02; TYR; ENSG00000077498; TAA
FISSKDLGY

SEQ ID NO: 97434 - protein, 9 aa, Homo sapiens
  Table A; Target 97434; HLA-C*07:04; TYR; ENSG00000077498; TAA
FISSKDLGY

SEQ ID NO: 97435 - protein, 9 aa, Homo sapiens
  Table A; Target 97435; HLA-C*16:01; TYR; ENSG00000077498; TAA
FISSKDLGY

SEQ ID NO: 97436 - protein, 9 aa, Homo sapiens
  Table A; Target 97436; HLA-C*16:02; TYR; ENSG00000077498; TAA
FISSKDLGY

SEQ ID NO: 97437 - protein, 11 aa, Homo sapiens
  Table A; Target 97437; HLA-A*01:01; TYR; ENSG00000077498; TAA
FISSKDLGYDY

SEQ ID NO: 97438 - protein, 11 aa, Homo sapiens
  Table A; Target 97438; HLA-A*29:02; TYR; ENSG00000077498; TAA
FISSKDLGYDY

SEQ ID NO: 97439 - protein, 9 aa, Homo sapiens
  Table A; Target 97439; HLA-A*02:01; TYR; ENSG00000077498; TAA
FLLRWEQEI

SEQ ID NO: 97440 - protein, 9 aa, Homo sapiens
  Table A; Target 97440; HLA-A*02:04; TYR; ENSG00000077498; TAA
FLLRWEQEI

SEQ ID NO: 97441 - protein, 9 aa, Homo sapiens
  Table A; Target 97441; HLA-A*02:07; TYR; ENSG00000077498; TAA
FLLRWEQEI

SEQ ID NO: 97442 - protein, 9 aa, Homo sapiens
  Table A; Target 97442; HLA-A*24:02; TYR; ENSG00000077498; TAA
FLLRWEQEI

SEQ ID NO: 97443 - protein, 9 aa, Homo sapiens
  Table A; Target 97443; HLA-A*02:07; TYR; ENSG00000077498; TAA
FLPWHRLFL

SEQ ID NO: 97444 - protein, 9 aa, Homo sapiens
  Table A; Target 97444; HLA-B*27:02; TYR; ENSG00000077498; TAA
FPFTGVDDR

SEQ ID NO: 97445 - protein, 9 aa, Homo sapiens
  Table A; Target 97445; HLA-B*35:01; TYR; ENSG00000077498; TAA
FPFTGVDDR

SEQ ID NO: 97446 - protein, 9 aa, Homo sapiens
  Table A; Target 97446; HLA-B*35:03; TYR; ENSG00000077498; TAA
FPFTGVDDR

SEQ ID NO: 97447 - protein, 9 aa, Homo sapiens
  Table A; Target 97447; HLA-B*54:01; TYR; ENSG00000077498; TAA
FPFTGVDDR

SEQ ID NO: 97448 - protein, 9 aa, Homo sapiens
  Table A; Target 97448; HLA-C*07:06; TYR; ENSG00000077498; TAA
FPFTGVDDR

SEQ ID NO: 97449 - protein, 8 aa, Homo sapiens
  Table A; Target 97449; HLA-A*01:01; TYR; ENSG00000077498; TAA
FQDYIKSY

SEQ ID NO: 97450 - protein, 8 aa, Homo sapiens
  Table A; Target 97450; HLA-B*15:03; TYR; ENSG00000077498; TAA
FQDYIKSY

SEQ ID NO: 97451 - protein, 9 aa, Homo sapiens
  Table A; Target 97451; HLA-A*01:01; TYR; ENSG00000077498; TAA
FQDYIKSYL

SEQ ID NO: 97452 - protein, 9 aa, Homo sapiens
  Table A; Target 97452; HLA-A*02:01; TYR; ENSG00000077498; TAA
FQDYIKSYL

SEQ ID NO: 97453 - protein, 9 aa, Homo sapiens
  Table A; Target 97453; HLA-A*02:04; TYR; ENSG00000077498; TAA
FQDYIKSYL

SEQ ID NO: 97454 - protein, 9 aa, Homo sapiens
  Table A; Target 97454; HLA-A*02:07; TYR; ENSG00000077498; TAA
FQDYIKSYL

SEQ ID NO: 97455 - protein, 9 aa, Homo sapiens
  Table A; Target 97455; HLA-A*31:01; TYR; ENSG00000077498; TAA
FQDYIKSYL

SEQ ID NO: 97456 - protein, 9 aa, Homo sapiens
  Table A; Target 97456; HLA-A*68:02; TYR; ENSG00000077498; TAA
FQDYIKSYL

SEQ ID NO: 97457 - protein, 9 aa, Homo sapiens
  Table A; Target 97457; HLA-B*38:01; TYR; ENSG00000077498; TAA
FQDYIKSYL

SEQ ID NO: 97458 - protein, 9 aa, Homo sapiens
  Table A; Target 97458; HLA-C*04:01; TYR; ENSG00000077498; TAA
FQDYIKSYL

SEQ ID NO: 97459 - protein, 9 aa, Homo sapiens
  Table A; Target 97459; HLA-C*05:01; TYR; ENSG00000077498; TAA
FQDYIKSYL

SEQ ID NO: 97460 - protein, 8 aa, Homo sapiens
  Table A; Target 97460; HLA-A*32:01; TYR; ENSG00000077498; TAA
FQTSAGHF

SEQ ID NO: 97461 - protein, 8 aa, Homo sapiens
  Table A; Target 97461; HLA-B*07:02; TYR; ENSG00000077498; TAA
FQTSAGHF

SEQ ID NO: 97462 - protein, 8 aa, Homo sapiens
  Table A; Target 97462; HLA-B*15:01; TYR; ENSG00000077498; TAA
FQTSAGHF

SEQ ID NO: 97463 - protein, 8 aa, Homo sapiens
  Table A; Target 97463; HLA-B*15:03; TYR; ENSG00000077498; TAA
FQTSAGHF

SEQ ID NO: 97464 - protein, 8 aa, Homo sapiens
  Table A; Target 97464; HLA-B*39:01; TYR; ENSG00000077498; TAA
FQTSAGHF

SEQ ID NO: 97465 - protein, 8 aa, Homo sapiens
  Table A; Target 97465; HLA-C*02:02; TYR; ENSG00000077498; TAA
FQTSAGHF

SEQ ID NO: 97466 - protein, 8 aa, Homo sapiens
  Table A; Target 97466; HLA-C*03:03; TYR; ENSG00000077498; TAA
FQTSAGHF

SEQ ID NO: 97467 - protein, 8 aa, Homo sapiens
  Table A; Target 97467; HLA-C*03:04; TYR; ENSG00000077498; TAA
FQTSAGHF

SEQ ID NO: 97468 - protein, 8 aa, Homo sapiens
  Table A; Target 97468; HLA-C*04:01; TYR; ENSG00000077498; TAA
FQTSAGHF

SEQ ID NO: 97469 - protein, 8 aa, Homo sapiens
  Table A; Target 97469; HLA-C*05:01; TYR; ENSG00000077498; TAA
FQTSAGHF

SEQ ID NO: 97470 - protein, 8 aa, Homo sapiens
  Table A; Target 97470; HLA-C*07:01; TYR; ENSG00000077498; TAA
FQTSAGHF

SEQ ID NO: 97471 - protein, 8 aa, Homo sapiens
  Table A; Target 97471; HLA-C*07:04; TYR; ENSG00000077498; TAA
FQTSAGHF

SEQ ID NO: 97472 - protein, 8 aa, Homo sapiens
  Table A; Target 97472; HLA-C*12:03; TYR; ENSG00000077498; TAA
FQTSAGHF

SEQ ID NO: 97473 - protein, 8 aa, Homo sapiens
  Table A; Target 97473; HLA-C*14:02; TYR; ENSG00000077498; TAA
FQTSAGHF

SEQ ID NO: 97474 - protein, 8 aa, Homo sapiens
  Table A; Target 97474; HLA-C*16:01; TYR; ENSG00000077498; TAA
FQTSAGHF

SEQ ID NO: 97475 - protein, 8 aa, Homo sapiens
  Table A; Target 97475; HLA-C*16:02; TYR; ENSG00000077498; TAA
FQTSAGHF

SEQ ID NO: 97476 - protein, 8 aa, Homo sapiens
  Table A; Target 97476; HLA-C*16:04; TYR; ENSG00000077498; TAA
FQTSAGHF

SEQ ID NO: 97477 - protein, 10 aa, Homo sapiens
  Table A; Target 97477; HLA-A*31:01; TYR; ENSG00000077498; TAA
FQTSAGHFPR

SEQ ID NO: 97478 - protein, 10 aa, Homo sapiens
  Table A; Target 97478; HLA-A*68:01; TYR; ENSG00000077498; TAA
FQTSAGHFPR

SEQ ID NO: 97479 - protein, 10 aa, Homo sapiens
  Table A; Target 97479; HLA-A*01:01; TYR; ENSG00000077498; TAA
FSFRNTLEGF

SEQ ID NO: 97480 - protein, 10 aa, Homo sapiens
  Table A; Target 97480; HLA-B*57:01; TYR; ENSG00000077498; TAA
FSFRNTLEGF

SEQ ID NO: 97481 - protein, 10 aa, Homo sapiens
  Table A; Target 97481; HLA-A*25:01; TYR; ENSG00000077498; TAA
FTGVDDRESW

SEQ ID NO: 97482 - protein, 10 aa, Homo sapiens
  Table A; Target 97482; HLA-B*57:01; TYR; ENSG00000077498; TAA
FTGVDDRESW

SEQ ID NO: 97483 - protein, 9 aa, Homo sapiens
  Table A; Target 97483; HLA-A*01:01; TYR; ENSG00000077498; TAA
FVDSIFEQW

SEQ ID NO: 97484 - protein, 9 aa, Homo sapiens
  Table A; Target 97484; HLA-A*02:01; TYR; ENSG00000077498; TAA
FVDSIFEQW

SEQ ID NO: 97485 - protein, 9 aa, Homo sapiens
  Table A; Target 97485; HLA-A*02:07; TYR; ENSG00000077498; TAA
FVDSIFEQW

SEQ ID NO: 97486 - protein, 9 aa, Homo sapiens
  Table A; Target 97486; HLA-A*24:02; TYR; ENSG00000077498; TAA
FVDSIFEQW

SEQ ID NO: 97487 - protein, 9 aa, Homo sapiens
  Table A; Target 97487; HLA-A*25:01; TYR; ENSG00000077498; TAA
FVDSIFEQW

SEQ ID NO: 97488 - protein, 9 aa, Homo sapiens
  Table A; Target 97488; HLA-A*29:02; TYR; ENSG00000077498; TAA
FVDSIFEQW

SEQ ID NO: 97489 - protein, 9 aa, Homo sapiens
  Table A; Target 97489; HLA-A*32:01; TYR; ENSG00000077498; TAA
FVDSIFEQW

SEQ ID NO: 97490 - protein, 9 aa, Homo sapiens
  Table A; Target 97490; HLA-A*33:01; TYR; ENSG00000077498; TAA
FVDSIFEQW

SEQ ID NO: 97491 - protein, 9 aa, Homo sapiens
  Table A; Target 97491; HLA-A*68:02; TYR; ENSG00000077498; TAA
FVDSIFEQW

SEQ ID NO: 97492 - protein, 9 aa, Homo sapiens
  Table A; Target 97492; HLA-B*35:01; TYR; ENSG00000077498; TAA
FVDSIFEQW

SEQ ID NO: 97493 - protein, 9 aa, Homo sapiens
  Table A; Target 97493; HLA-B*38:01; TYR; ENSG00000077498; TAA
FVDSIFEQW

SEQ ID NO: 97494 - protein, 9 aa, Homo sapiens
  Table A; Target 97494; HLA-B*44:02; TYR; ENSG00000077498; TAA
FVDSIFEQW

SEQ ID NO: 97495 - protein, 9 aa, Homo sapiens
  Table A; Target 97495; HLA-B*44:03; TYR; ENSG00000077498; TAA
FVDSIFEQW

SEQ ID NO: 97496 - protein, 9 aa, Homo sapiens
  Table A; Target 97496; HLA-B*57:01; TYR; ENSG00000077498; TAA
FVDSIFEQW

SEQ ID NO: 97497 - protein, 9 aa, Homo sapiens
  Table A; Target 97497; HLA-B*58:01; TYR; ENSG00000077498; TAA
FVDSIFEQW

SEQ ID NO: 97498 - protein, 9 aa, Homo sapiens
  Table A; Target 97498; HLA-C*02:02; TYR; ENSG00000077498; TAA
FVDSIFEQW

SEQ ID NO: 97499 - protein, 9 aa, Homo sapiens
  Table A; Target 97499; HLA-C*03:04; TYR; ENSG00000077498; TAA
FVDSIFEQW

SEQ ID NO: 97500 - protein, 9 aa, Homo sapiens
  Table A; Target 97500; HLA-C*05:01; TYR; ENSG00000077498; TAA
FVDSIFEQW

SEQ ID NO: 97501 - protein, 10 aa, Homo sapiens
  Table A; Target 97501; HLA-A*02:07; TYR; ENSG00000077498; TAA
FVDSIFEQWL

SEQ ID NO: 97502 - protein, 10 aa, Homo sapiens
  Table A; Target 97502; HLA-A*68:02; TYR; ENSG00000077498; TAA
FVDSIFEQWL

SEQ ID NO: 97503 - protein, 9 aa, Homo sapiens
  Table A; Target 97503; HLA-A*23:01; TYR; ENSG00000077498; TAA
GAAMVGAVL

SEQ ID NO: 97504 - protein, 9 aa, Homo sapiens
  Table A; Target 97504; HLA-A*26:01; TYR; ENSG00000077498; TAA
GAAMVGAVL

SEQ ID NO: 97505 - protein, 9 aa, Homo sapiens
  Table A; Target 97505; HLA-A*30:01; TYR; ENSG00000077498; TAA
GAAMVGAVL

SEQ ID NO: 97506 - protein, 9 aa, Homo sapiens
  Table A; Target 97506; HLA-B*07:02; TYR; ENSG00000077498; TAA
GAAMVGAVL

SEQ ID NO: 97507 - protein, 9 aa, Homo sapiens
  Table A; Target 97507; HLA-B*13:02; TYR; ENSG00000077498; TAA
GAAMVGAVL

SEQ ID NO: 97508 - protein, 9 aa, Homo sapiens
  Table A; Target 97508; HLA-B*15:01; TYR; ENSG00000077498; TAA
GAAMVGAVL

SEQ ID NO: 97509 - protein, 9 aa, Homo sapiens
  Table A; Target 97509; HLA-B*15:03; TYR; ENSG00000077498; TAA
GAAMVGAVL

SEQ ID NO: 97510 - protein, 9 aa, Homo sapiens
  Table A; Target 97510; HLA-B*27:05; TYR; ENSG00000077498; TAA
GAAMVGAVL

SEQ ID NO: 97511 - protein, 9 aa, Homo sapiens
  Table A; Target 97511; HLA-B*35:01; TYR; ENSG00000077498; TAA
GAAMVGAVL

SEQ ID NO: 97512 - protein, 9 aa, Homo sapiens
  Table A; Target 97512; HLA-B*35:03; TYR; ENSG00000077498; TAA
GAAMVGAVL

SEQ ID NO: 97513 - protein, 9 aa, Homo sapiens
  Table A; Target 97513; HLA-B*38:01; TYR; ENSG00000077498; TAA
GAAMVGAVL

SEQ ID NO: 97514 - protein, 9 aa, Homo sapiens
  Table A; Target 97514; HLA-B*39:01; TYR; ENSG00000077498; TAA
GAAMVGAVL

SEQ ID NO: 97515 - protein, 9 aa, Homo sapiens
  Table A; Target 97515; HLA-B*40:01; TYR; ENSG00000077498; TAA
GAAMVGAVL

SEQ ID NO: 97516 - protein, 9 aa, Homo sapiens
  Table A; Target 97516; HLA-B*40:02; TYR; ENSG00000077498; TAA
GAAMVGAVL

SEQ ID NO: 97517 - protein, 9 aa, Homo sapiens
  Table A; Target 97517; HLA-B*46:01; TYR; ENSG00000077498; TAA
GAAMVGAVL

SEQ ID NO: 97518 - protein, 9 aa, Homo sapiens
  Table A; Target 97518; HLA-B*58:01; TYR; ENSG00000077498; TAA
GAAMVGAVL

SEQ ID NO: 97519 - protein, 9 aa, Homo sapiens
  Table A; Target 97519; HLA-C*01:02; TYR; ENSG00000077498; TAA
GAAMVGAVL

SEQ ID NO: 97520 - protein, 9 aa, Homo sapiens
  Table A; Target 97520; HLA-C*02:02; TYR; ENSG00000077498; TAA
GAAMVGAVL

SEQ ID NO: 97521 - protein, 9 aa, Homo sapiens
  Table A; Target 97521; HLA-C*03:03; TYR; ENSG00000077498; TAA
GAAMVGAVL

SEQ ID NO: 97522 - protein, 9 aa, Homo sapiens
  Table A; Target 97522; HLA-C*03:04; TYR; ENSG00000077498; TAA
GAAMVGAVL

SEQ ID NO: 97523 - protein, 9 aa, Homo sapiens
  Table A; Target 97523; HLA-C*05:01; TYR; ENSG00000077498; TAA
GAAMVGAVL

SEQ ID NO: 97524 - protein, 9 aa, Homo sapiens
  Table A; Target 97524; HLA-C*06:02; TYR; ENSG00000077498; TAA
GAAMVGAVL

SEQ ID NO: 97525 - protein, 9 aa, Homo sapiens
  Table A; Target 97525; HLA-C*07:02; TYR; ENSG00000077498; TAA
GAAMVGAVL

SEQ ID NO: 97526 - protein, 9 aa, Homo sapiens
  Table A; Target 97526; HLA-C*07:04; TYR; ENSG00000077498; TAA
GAAMVGAVL

SEQ ID NO: 97527 - protein, 9 aa, Homo sapiens
  Table A; Target 97527; HLA-C*07:06; TYR; ENSG00000077498; TAA
GAAMVGAVL

SEQ ID NO: 97528 - protein, 9 aa, Homo sapiens
  Table A; Target 97528; HLA-C*12:03; TYR; ENSG00000077498; TAA
GAAMVGAVL

SEQ ID NO: 97529 - protein, 9 aa, Homo sapiens
  Table A; Target 97529; HLA-C*14:02; TYR; ENSG00000077498; TAA
GAAMVGAVL

SEQ ID NO: 97530 - protein, 9 aa, Homo sapiens
  Table A; Target 97530; HLA-C*16:01; TYR; ENSG00000077498; TAA
GAAMVGAVL

SEQ ID NO: 97531 - protein, 9 aa, Homo sapiens
  Table A; Target 97531; HLA-C*16:02; TYR; ENSG00000077498; TAA
GAAMVGAVL

SEQ ID NO: 97532 - protein, 9 aa, Homo sapiens
  Table A; Target 97532; HLA-C*16:04; TYR; ENSG00000077498; TAA
GAAMVGAVL

SEQ ID NO: 97533 - protein, 8 aa, Homo sapiens
  Table A; Target 97533; HLA-A*03:02; TYR; ENSG00000077498; TAA
GDFFISSK

SEQ ID NO: 97534 - protein, 8 aa, Homo sapiens
  Table A; Target 97534; HLA-A*11:01; TYR; ENSG00000077498; TAA
GDFFISSK

SEQ ID NO: 97535 - protein, 8 aa, Homo sapiens
  Table A; Target 97535; HLA-B*27:02; TYR; ENSG00000077498; TAA
GDFFISSK

SEQ ID NO: 97536 - protein, 8 aa, Homo sapiens
  Table A; Target 97536; HLA-B*27:05; TYR; ENSG00000077498; TAA
GDFFISSK

SEQ ID NO: 97537 - protein, 8 aa, Homo sapiens
  Table A; Target 97537; HLA-B*37:01; TYR; ENSG00000077498; TAA
GDFFISSK

SEQ ID NO: 97538 - protein, 8 aa, Homo sapiens
  Table A; Target 97538; HLA-C*04:01; TYR; ENSG00000077498; TAA
GDFFISSK

SEQ ID NO: 97539 - protein, 8 aa, Homo sapiens
  Table A; Target 97539; HLA-C*07:01; TYR; ENSG00000077498; TAA
GDFFISSK

SEQ ID NO: 97540 - protein, 9 aa, Homo sapiens
  Table A; Target 97540; HLA-A*02:03; TYR; ENSG00000077498; TAA
GFASPLTGI

SEQ ID NO: 97541 - protein, 9 aa, Homo sapiens
  Table A; Target 97541; HLA-A*23:01; TYR; ENSG00000077498; TAA
GFASPLTGI

SEQ ID NO: 97542 - protein, 9 aa, Homo sapiens
  Table A; Target 97542; HLA-A*24:02; TYR; ENSG00000077498; TAA
GFASPLTGI

SEQ ID NO: 97543 - protein, 9 aa, Homo sapiens
  Table A; Target 97543; HLA-B*13:02; TYR; ENSG00000077498; TAA
GFASPLTGI

SEQ ID NO: 97544 - protein, 9 aa, Homo sapiens
  Table A; Target 97544; HLA-C*04:01; TYR; ENSG00000077498; TAA
GFASPLTGI

SEQ ID NO: 97545 - protein, 9 aa, Homo sapiens
  Table A; Target 97545; HLA-C*14:02; TYR; ENSG00000077498; TAA
GFASPLTGI

SEQ ID NO: 97546 - protein, 10 aa, Homo sapiens
  Table A; Target 97546; HLA-A*25:01; TYR; ENSG00000077498; TAA
GIADASQSSM

SEQ ID NO: 97547 - protein, 10 aa, Homo sapiens
  Table A; Target 97547; HLA-A*26:01; TYR; ENSG00000077498; TAA
GIADASQSSM

SEQ ID NO: 97548 - protein, 10 aa, Homo sapiens
  Table A; Target 97548; HLA-A*32:01; TYR; ENSG00000077498; TAA
GIADASQSSM

SEQ ID NO: 97549 - protein, 10 aa, Homo sapiens
  Table A; Target 97549; HLA-B*07:02; TYR; ENSG00000077498; TAA
GIADASQSSM

SEQ ID NO: 97550 - protein, 10 aa, Homo sapiens
  Table A; Target 97550; HLA-B*15:01; TYR; ENSG00000077498; TAA
GIADASQSSM

SEQ ID NO: 97551 - protein, 10 aa, Homo sapiens
  Table A; Target 97551; HLA-B*15:03; TYR; ENSG00000077498; TAA
GIADASQSSM

SEQ ID NO: 97552 - protein, 10 aa, Homo sapiens
  Table A; Target 97552; HLA-B*27:05; TYR; ENSG00000077498; TAA
GIADASQSSM

SEQ ID NO: 97553 - protein, 10 aa, Homo sapiens
  Table A; Target 97553; HLA-B*39:01; TYR; ENSG00000077498; TAA
GIADASQSSM

SEQ ID NO: 97554 - protein, 10 aa, Homo sapiens
  Table A; Target 97554; HLA-B*46:01; TYR; ENSG00000077498; TAA
GIADASQSSM

SEQ ID NO: 97555 - protein, 10 aa, Homo sapiens
  Table A; Target 97555; HLA-B*58:01; TYR; ENSG00000077498; TAA
GIADASQSSM

SEQ ID NO: 97556 - protein, 10 aa, Homo sapiens
  Table A; Target 97556; HLA-C*01:02; TYR; ENSG00000077498; TAA
GIADASQSSM

SEQ ID NO: 97557 - protein, 10 aa, Homo sapiens
  Table A; Target 97557; HLA-C*02:02; TYR; ENSG00000077498; TAA
GIADASQSSM

SEQ ID NO: 97558 - protein, 10 aa, Homo sapiens
  Table A; Target 97558; HLA-C*03:03; TYR; ENSG00000077498; TAA
GIADASQSSM

SEQ ID NO: 97559 - protein, 10 aa, Homo sapiens
  Table A; Target 97559; HLA-C*03:04; TYR; ENSG00000077498; TAA
GIADASQSSM

SEQ ID NO: 97560 - protein, 10 aa, Homo sapiens
  Table A; Target 97560; HLA-C*07:04; TYR; ENSG00000077498; TAA
GIADASQSSM

SEQ ID NO: 97561 - protein, 10 aa, Homo sapiens
  Table A; Target 97561; HLA-C*14:02; TYR; ENSG00000077498; TAA
GIADASQSSM

SEQ ID NO: 97562 - protein, 10 aa, Homo sapiens
  Table A; Target 97562; HLA-C*16:04; TYR; ENSG00000077498; TAA
GIADASQSSM

SEQ ID NO: 97563 - protein, 9 aa, Homo sapiens
  Table A; Target 97563; HLA-B*07:02; TYR; ENSG00000077498; TAA
GPNCTERRL

SEQ ID NO: 97564 - protein, 9 aa, Homo sapiens
  Table A; Target 97564; HLA-B*07:02; TYR; ENSG00000077498; TAA
GPQFPFTGV

SEQ ID NO: 97565 - protein, 9 aa, Homo sapiens
  Table A; Target 97565; HLA-B*54:01; TYR; ENSG00000077498; TAA
GPQFPFTGV

SEQ ID NO: 97566 - protein, 9 aa, Homo sapiens
  Table A; Target 97566; HLA-B*55:01; TYR; ENSG00000077498; TAA
GPQFPFTGV

SEQ ID NO: 97567 - protein, 9 aa, Homo sapiens
  Table A; Target 97567; HLA-B*56:01; TYR; ENSG00000077498; TAA
GPQFPFTGV

SEQ ID NO: 97568 - protein, 9 aa, Homo sapiens
  Table A; Target 97568; HLA-C*07:02; TYR; ENSG00000077498; TAA
GPQFPFTGV

SEQ ID NO: 97569 - protein, 9 aa, Homo sapiens
  Table A; Target 97569; HLA-A*02:01; TYR; ENSG00000077498; TAA
GQHPTNPNL

SEQ ID NO: 97570 - protein, 9 aa, Homo sapiens
  Table A; Target 97570; HLA-A*02:04; TYR; ENSG00000077498; TAA
GQHPTNPNL

SEQ ID NO: 97571 - protein, 9 aa, Homo sapiens
  Table A; Target 97571; HLA-A*30:01; TYR; ENSG00000077498; TAA
GQHPTNPNL

SEQ ID NO: 97572 - protein, 9 aa, Homo sapiens
  Table A; Target 97572; HLA-A*30:02; TYR; ENSG00000077498; TAA
GQHPTNPNL

SEQ ID NO: 97573 - protein, 9 aa, Homo sapiens
  Table A; Target 97573; HLA-A*32:01; TYR; ENSG00000077498; TAA
GQHPTNPNL

SEQ ID NO: 97574 - protein, 9 aa, Homo sapiens
  Table A; Target 97574; HLA-B*13:02; TYR; ENSG00000077498; TAA
GQHPTNPNL

SEQ ID NO: 97575 - protein, 9 aa, Homo sapiens
  Table A; Target 97575; HLA-B*15:01; TYR; ENSG00000077498; TAA
GQHPTNPNL

SEQ ID NO: 97576 - protein, 9 aa, Homo sapiens
  Table A; Target 97576; HLA-B*15:03; TYR; ENSG00000077498; TAA
GQHPTNPNL

SEQ ID NO: 97577 - protein, 9 aa, Homo sapiens
  Table A; Target 97577; HLA-B*27:02; TYR; ENSG00000077498; TAA
GQHPTNPNL

SEQ ID NO: 97578 - protein, 9 aa, Homo sapiens
  Table A; Target 97578; HLA-B*27:05; TYR; ENSG00000077498; TAA
GQHPTNPNL

SEQ ID NO: 97579 - protein, 9 aa, Homo sapiens
  Table A; Target 97579; HLA-B*37:01; TYR; ENSG00000077498; TAA
GQHPTNPNL

SEQ ID NO: 97580 - protein, 9 aa, Homo sapiens
  Table A; Target 97580; HLA-B*38:01; TYR; ENSG00000077498; TAA
GQHPTNPNL

SEQ ID NO: 97581 - protein, 9 aa, Homo sapiens
  Table A; Target 97581; HLA-B*39:01; TYR; ENSG00000077498; TAA
GQHPTNPNL

SEQ ID NO: 97582 - protein, 9 aa, Homo sapiens
  Table A; Target 97582; HLA-B*40:01; TYR; ENSG00000077498; TAA
GQHPTNPNL

SEQ ID NO: 97583 - protein, 9 aa, Homo sapiens
  Table A; Target 97583; HLA-B*40:02; TYR; ENSG00000077498; TAA
GQHPTNPNL

SEQ ID NO: 97584 - protein, 9 aa, Homo sapiens
  Table A; Target 97584; HLA-B*58:01; TYR; ENSG00000077498; TAA
GQHPTNPNL

SEQ ID NO: 97585 - protein, 9 aa, Homo sapiens
  Table A; Target 97585; HLA-C*02:02; TYR; ENSG00000077498; TAA
GQHPTNPNL

SEQ ID NO: 97586 - protein, 9 aa, Homo sapiens
  Table A; Target 97586; HLA-C*06:02; TYR; ENSG00000077498; TAA
GQHPTNPNL

SEQ ID NO: 97587 - protein, 9 aa, Homo sapiens
  Table A; Target 97587; HLA-C*07:04; TYR; ENSG00000077498; TAA
GQHPTNPNL

SEQ ID NO: 97588 - protein, 9 aa, Homo sapiens
  Table A; Target 97588; HLA-C*16:04; TYR; ENSG00000077498; TAA
GQHPTNPNL

SEQ ID NO: 97589 - protein, 10 aa, Homo sapiens
  Table A; Target 97589; HLA-A*02:03; TYR; ENSG00000077498; TAA
GQHPTNPNLL

SEQ ID NO: 97590 - protein, 10 aa, Homo sapiens
  Table A; Target 97590; HLA-A*30:01; TYR; ENSG00000077498; TAA
GQHPTNPNLL

SEQ ID NO: 97591 - protein, 10 aa, Homo sapiens
  Table A; Target 97591; HLA-B*13:02; TYR; ENSG00000077498; TAA
GQHPTNPNLL

SEQ ID NO: 97592 - protein, 10 aa, Homo sapiens
  Table A; Target 97592; HLA-B*15:01; TYR; ENSG00000077498; TAA
GQHPTNPNLL

SEQ ID NO: 97593 - protein, 10 aa, Homo sapiens
  Table A; Target 97593; HLA-B*15:03; TYR; ENSG00000077498; TAA
GQHPTNPNLL

SEQ ID NO: 97594 - protein, 10 aa, Homo sapiens
  Table A; Target 97594; HLA-B*27:05; TYR; ENSG00000077498; TAA
GQHPTNPNLL

SEQ ID NO: 97595 - protein, 10 aa, Homo sapiens
  Table A; Target 97595; HLA-B*38:01; TYR; ENSG00000077498; TAA
GQHPTNPNLL

SEQ ID NO: 97596 - protein, 10 aa, Homo sapiens
  Table A; Target 97596; HLA-B*39:01; TYR; ENSG00000077498; TAA
GQHPTNPNLL

SEQ ID NO: 97597 - protein, 10 aa, Homo sapiens
  Table A; Target 97597; HLA-B*40:01; TYR; ENSG00000077498; TAA
GQHPTNPNLL

SEQ ID NO: 97598 - protein, 10 aa, Homo sapiens
  Table A; Target 97598; HLA-B*40:02; TYR; ENSG00000077498; TAA
GQHPTNPNLL

SEQ ID NO: 97599 - protein, 10 aa, Homo sapiens
  Table A; Target 97599; HLA-C*06:02; TYR; ENSG00000077498; TAA
GQHPTNPNLL

SEQ ID NO: 97600 - protein, 10 aa, Homo sapiens
  Table A; Target 97600; HLA-C*07:02; TYR; ENSG00000077498; TAA
GQHPTNPNLL

SEQ ID NO: 97601 - protein, 10 aa, Homo sapiens
  Table A; Target 97601; HLA-C*07:04; TYR; ENSG00000077498; TAA
GQHPTNPNLL

SEQ ID NO: 97602 - protein, 10 aa, Homo sapiens
  Table A; Target 97602; HLA-C*16:04; TYR; ENSG00000077498; TAA
GQHPTNPNLL

SEQ ID NO: 97603 - protein, 9 aa, Homo sapiens
  Table A; Target 97603; HLA-B*15:01; TYR; ENSG00000077498; TAA
GQMKNGSTP

SEQ ID NO: 97604 - protein, 10 aa, Homo sapiens
  Table A; Target 97604; HLA-A*03:02; TYR; ENSG00000077498; TAA
GQMKNGSTPM

SEQ ID NO: 97605 - protein, 10 aa, Homo sapiens
  Table A; Target 97605; HLA-A*32:01; TYR; ENSG00000077498; TAA
GQMKNGSTPM

SEQ ID NO: 97606 - protein, 10 aa, Homo sapiens
  Table A; Target 97606; HLA-B*13:02; TYR; ENSG00000077498; TAA
GQMKNGSTPM

SEQ ID NO: 97607 - protein, 10 aa, Homo sapiens
  Table A; Target 97607; HLA-B*15:01; TYR; ENSG00000077498; TAA
GQMKNGSTPM

SEQ ID NO: 97608 - protein, 10 aa, Homo sapiens
  Table A; Target 97608; HLA-B*15:03; TYR; ENSG00000077498; TAA
GQMKNGSTPM

SEQ ID NO: 97609 - protein, 10 aa, Homo sapiens
  Table A; Target 97609; HLA-B*27:05; TYR; ENSG00000077498; TAA
GQMKNGSTPM

SEQ ID NO: 97610 - protein, 10 aa, Homo sapiens
  Table A; Target 97610; HLA-B*39:01; TYR; ENSG00000077498; TAA
GQMKNGSTPM

SEQ ID NO: 97611 - protein, 10 aa, Homo sapiens
  Table A; Target 97611; HLA-B*46:01; TYR; ENSG00000077498; TAA
GQMKNGSTPM

SEQ ID NO: 97612 - protein, 10 aa, Homo sapiens
  Table A; Target 97612; HLA-C*07:02; TYR; ENSG00000077498; TAA
GQMKNGSTPM

SEQ ID NO: 97613 - protein, 10 aa, Homo sapiens
  Table A; Target 97613; HLA-C*07:04; TYR; ENSG00000077498; TAA
GQMKNGSTPM

SEQ ID NO: 97614 - protein, 10 aa, Homo sapiens
  Table A; Target 97614; HLA-C*14:02; TYR; ENSG00000077498; TAA
GQMKNGSTPM

SEQ ID NO: 97615 - protein, 10 aa, Homo sapiens
  Table A; Target 97615; HLA-C*16:04; TYR; ENSG00000077498; TAA
GQMKNGSTPM

SEQ ID NO: 97616 - protein, 11 aa, Homo sapiens
  Table A; Target 97616; HLA-B*15:01; TYR; ENSG00000077498; TAA
GQMKNGSTPMF

SEQ ID NO: 97617 - protein, 11 aa, Homo sapiens
  Table A; Target 97617; HLA-B*15:03; TYR; ENSG00000077498; TAA
GQMKNGSTPMF

SEQ ID NO: 97618 - protein, 11 aa, Homo sapiens
  Table A; Target 97618; HLA-C*16:04; TYR; ENSG00000077498; TAA
GQMKNGSTPMF

SEQ ID NO: 97619 - protein, 9 aa, Homo sapiens
  Table A; Target 97619; HLA-C*07:01; TYR; ENSG00000077498; TAA
GRGSCQNIL

SEQ ID NO: 97620 - protein, 9 aa, Homo sapiens
  Table A; Target 97620; HLA-B*58:01; TYR; ENSG00000077498; TAA
GSANDPIFL

SEQ ID NO: 97621 - protein, 9 aa, Homo sapiens
  Table A; Target 97621; HLA-A*03:01; TYR; ENSG00000077498; TAA
GSMDKAANF

SEQ ID NO: 97622 - protein, 9 aa, Homo sapiens
  Table A; Target 97622; HLA-A*03:02; TYR; ENSG00000077498; TAA
GSMDKAANF

SEQ ID NO: 97623 - protein, 9 aa, Homo sapiens
  Table A; Target 97623; HLA-A*11:01; TYR; ENSG00000077498; TAA
GSMDKAANF

SEQ ID NO: 97624 - protein, 9 aa, Homo sapiens
  Table A; Target 97624; HLA-A*23:01; TYR; ENSG00000077498; TAA
GSMDKAANF

SEQ ID NO: 97625 - protein, 9 aa, Homo sapiens
  Table A; Target 97625; HLA-A*24:02; TYR; ENSG00000077498; TAA
GSMDKAANF

SEQ ID NO: 97626 - protein, 9 aa, Homo sapiens
  Table A; Target 97626; HLA-A*25:01; TYR; ENSG00000077498; TAA
GSMDKAANF

SEQ ID NO: 97627 - protein, 9 aa, Homo sapiens
  Table A; Target 97627; HLA-A*26:01; TYR; ENSG00000077498; TAA
GSMDKAANF

SEQ ID NO: 97628 - protein, 9 aa, Homo sapiens
  Table A; Target 97628; HLA-A*29:02; TYR; ENSG00000077498; TAA
GSMDKAANF

SEQ ID NO: 97629 - protein, 9 aa, Homo sapiens
  Table A; Target 97629; HLA-A*30:02; TYR; ENSG00000077498; TAA
GSMDKAANF

SEQ ID NO: 97630 - protein, 9 aa, Homo sapiens
  Table A; Target 97630; HLA-A*31:01; TYR; ENSG00000077498; TAA
GSMDKAANF

SEQ ID NO: 97631 - protein, 9 aa, Homo sapiens
  Table A; Target 97631; HLA-A*32:01; TYR; ENSG00000077498; TAA
GSMDKAANF

SEQ ID NO: 97632 - protein, 9 aa, Homo sapiens
  Table A; Target 97632; HLA-B*15:01; TYR; ENSG00000077498; TAA
GSMDKAANF

SEQ ID NO: 97633 - protein, 9 aa, Homo sapiens
  Table A; Target 97633; HLA-B*15:03; TYR; ENSG00000077498; TAA
GSMDKAANF

SEQ ID NO: 97634 - protein, 9 aa, Homo sapiens
  Table A; Target 97634; HLA-B*27:02; TYR; ENSG00000077498; TAA
GSMDKAANF

SEQ ID NO: 97635 - protein, 9 aa, Homo sapiens
  Table A; Target 97635; HLA-B*27:05; TYR; ENSG00000077498; TAA
GSMDKAANF

SEQ ID NO: 97636 - protein, 9 aa, Homo sapiens
  Table A; Target 97636; HLA-B*37:01; TYR; ENSG00000077498; TAA
GSMDKAANF

SEQ ID NO: 97637 - protein, 9 aa, Homo sapiens
  Table A; Target 97637; HLA-B*39:01; TYR; ENSG00000077498; TAA
GSMDKAANF

SEQ ID NO: 97638 - protein, 9 aa, Homo sapiens
  Table A; Target 97638; HLA-B*44:02; TYR; ENSG00000077498; TAA
GSMDKAANF

SEQ ID NO: 97639 - protein, 9 aa, Homo sapiens
  Table A; Target 97639; HLA-B*44:03; TYR; ENSG00000077498; TAA
GSMDKAANF

SEQ ID NO: 97640 - protein, 9 aa, Homo sapiens
  Table A; Target 97640; HLA-B*46:01; TYR; ENSG00000077498; TAA
GSMDKAANF

SEQ ID NO: 97641 - protein, 9 aa, Homo sapiens
  Table A; Target 97641; HLA-B*57:01; TYR; ENSG00000077498; TAA
GSMDKAANF

SEQ ID NO: 97642 - protein, 9 aa, Homo sapiens
  Table A; Target 97642; HLA-B*58:01; TYR; ENSG00000077498; TAA
GSMDKAANF

SEQ ID NO: 97643 - protein, 9 aa, Homo sapiens
  Table A; Target 97643; HLA-C*02:02; TYR; ENSG00000077498; TAA
GSMDKAANF

SEQ ID NO: 97644 - protein, 9 aa, Homo sapiens
  Table A; Target 97644; HLA-C*05:01; TYR; ENSG00000077498; TAA
GSMDKAANF

SEQ ID NO: 97645 - protein, 9 aa, Homo sapiens
  Table A; Target 97645; HLA-C*07:04; TYR; ENSG00000077498; TAA
GSMDKAANF

SEQ ID NO: 97646 - protein, 9 aa, Homo sapiens
  Table A; Target 97646; HLA-C*07:06; TYR; ENSG00000077498; TAA
GSMDKAANF

SEQ ID NO: 97647 - protein, 9 aa, Homo sapiens
  Table A; Target 97647; HLA-C*12:03; TYR; ENSG00000077498; TAA
GSMDKAANF

SEQ ID NO: 97648 - protein, 9 aa, Homo sapiens
  Table A; Target 97648; HLA-C*14:02; TYR; ENSG00000077498; TAA
GSMDKAANF

SEQ ID NO: 97649 - protein, 9 aa, Homo sapiens
  Table A; Target 97649; HLA-C*16:01; TYR; ENSG00000077498; TAA
GSMDKAANF

SEQ ID NO: 97650 - protein, 9 aa, Homo sapiens
  Table A; Target 97650; HLA-C*16:02; TYR; ENSG00000077498; TAA
GSMDKAANF

SEQ ID NO: 97651 - protein, 9 aa, Homo sapiens
  Table A; Target 97651; HLA-C*16:04; TYR; ENSG00000077498; TAA
GSMDKAANF

SEQ ID NO: 97652 - protein, 11 aa, Homo sapiens
  Table A; Target 97652; HLA-A*11:01; TYR; ENSG00000077498; TAA
GSMDKAANFSF

SEQ ID NO: 97653 - protein, 11 aa, Homo sapiens
  Table A; Target 97653; HLA-A*29:02; TYR; ENSG00000077498; TAA
GSMDKAANFSF

SEQ ID NO: 97654 - protein, 11 aa, Homo sapiens
  Table A; Target 97654; HLA-A*30:02; TYR; ENSG00000077498; TAA
GSMDKAANFSF

SEQ ID NO: 97655 - protein, 11 aa, Homo sapiens
  Table A; Target 97655; HLA-A*31:01; TYR; ENSG00000077498; TAA
GSMDKAANFSF

SEQ ID NO: 97656 - protein, 11 aa, Homo sapiens
  Table A; Target 97656; HLA-B*15:01; TYR; ENSG00000077498; TAA
GSMDKAANFSF

SEQ ID NO: 97657 - protein, 11 aa, Homo sapiens
  Table A; Target 97657; HLA-B*57:01; TYR; ENSG00000077498; TAA
GSMDKAANFSF

SEQ ID NO: 97658 - protein, 11 aa, Homo sapiens
  Table A; Target 97658; HLA-B*58:01; TYR; ENSG00000077498; TAA
GSMDKAANFSF

SEQ ID NO: 97659 - protein, 11 aa, Homo sapiens
  Table A; Target 97659; HLA-C*16:04; TYR; ENSG00000077498; TAA
GSMDKAANFSF

SEQ ID NO: 97660 - protein, 8 aa, Homo sapiens
  Table A; Target 97660; HLA-A*11:01; TYR; ENSG00000077498; TAA
GTPEGPLR

SEQ ID NO: 97661 - protein, 8 aa, Homo sapiens
  Table A; Target 97661; HLA-C*07:06; TYR; ENSG00000077498; TAA
GTPEGPLR

SEQ ID NO: 97662 - protein, 9 aa, Homo sapiens
  Table A; Target 97662; HLA-A*01:01; TYR; ENSG00000077498; TAA
GTPEGPLRR

SEQ ID NO: 97663 - protein, 9 aa, Homo sapiens
  Table A; Target 97663; HLA-A*03:01; TYR; ENSG00000077498; TAA
GTPEGPLRR

SEQ ID NO: 97664 - protein, 9 aa, Homo sapiens
  Table A; Target 97664; HLA-A*11:01; TYR; ENSG00000077498; TAA
GTPEGPLRR

SEQ ID NO: 97665 - protein, 9 aa, Homo sapiens
  Table A; Target 97665; HLA-A*29:02; TYR; ENSG00000077498; TAA
GTPEGPLRR

SEQ ID NO: 97666 - protein, 9 aa, Homo sapiens
  Table A; Target 97666; HLA-A*31:01; TYR; ENSG00000077498; TAA
GTPEGPLRR

SEQ ID NO: 97667 - protein, 9 aa, Homo sapiens
  Table A; Target 97667; HLA-A*68:01; TYR; ENSG00000077498; TAA
GTPEGPLRR

SEQ ID NO: 97668 - protein, 9 aa, Homo sapiens
  Table A; Target 97668; HLA-C*07:06; TYR; ENSG00000077498; TAA
GTPEGPLRR

SEQ ID NO: 97669 - protein, 11 aa, Homo sapiens
  Table A; Target 97669; HLA-A*02:07; TYR; ENSG00000077498; TAA
GVDDRESWPSV

SEQ ID NO: 97670 - protein, 8 aa, Homo sapiens
  Table A; Target 97670; HLA-B*35:01; TYR; ENSG00000077498; TAA
HAFVDSIF

SEQ ID NO: 97671 - protein, 8 aa, Homo sapiens
  Table A; Target 97671; HLA-B*35:03; TYR; ENSG00000077498; TAA
HAFVDSIF

SEQ ID NO: 97672 - protein, 11 aa, Homo sapiens
  Table A; Target 97672; HLA-B*57:01; TYR; ENSG00000077498; TAA
HAFVDSIFEQW

SEQ ID NO: 97673 - protein, 8 aa, Homo sapiens
  Table A; Target 97673; HLA-B*18:01; TYR; ENSG00000077498; TAA
HEAPAFLP

SEQ ID NO: 97674 - protein, 9 aa, Homo sapiens
  Table A; Target 97674; HLA-A*24:02; TYR; ENSG00000077498; TAA
HEAPAFLPW

SEQ ID NO: 97675 - protein, 9 aa, Homo sapiens
  Table A; Target 97675; HLA-B*18:01; TYR; ENSG00000077498; TAA
HEAPAFLPW

SEQ ID NO: 97676 - protein, 9 aa, Homo sapiens
  Table A; Target 97676; HLA-B*44:02; TYR; ENSG00000077498; TAA
HEAPAFLPW

SEQ ID NO: 97677 - protein, 9 aa, Homo sapiens
  Table A; Target 97677; HLA-B*44:03; TYR; ENSG00000077498; TAA
HEAPAFLPW

SEQ ID NO: 97678 - protein, 9 aa, Homo sapiens
  Table A; Target 97678; HLA-B*57:01; TYR; ENSG00000077498; TAA
HEAPAFLPW

SEQ ID NO: 97679 - protein, 8 aa, Homo sapiens
  Table A; Target 97679; HLA-B*38:01; TYR; ENSG00000077498; TAA
HHAFVDSI

SEQ ID NO: 97680 - protein, 9 aa, Homo sapiens
  Table A; Target 97680; HLA-B*38:01; TYR; ENSG00000077498; TAA
HHAFVDSIF

SEQ ID NO: 97681 - protein, 8 aa, Homo sapiens
  Table A; Target 97681; HLA-C*04:01; TYR; ENSG00000077498; TAA
HIYMNGTM

SEQ ID NO: 97682 - protein, 8 aa, Homo sapiens
  Table A; Target 97682; HLA-C*07:01; TYR; ENSG00000077498; TAA
HIYMNGTM

SEQ ID NO: 97683 - protein, 10 aa, Homo sapiens
  Table A; Target 97683; HLA-C*07:01; TYR; ENSG00000077498; TAA
HIYMNGTMSQ

SEQ ID NO: 97684 - protein, 11 aa, Homo sapiens
  Table A; Target 97684; HLA-A*68:02; TYR; ENSG00000077498; TAA
HIYMNGTMSQV

SEQ ID NO: 97685 - protein, 8 aa, Homo sapiens
  Table A; Target 97685; HLA-C*07:01; TYR; ENSG00000077498; TAA
HNALHIYM

SEQ ID NO: 97686 - protein, 8 aa, Homo sapiens
  Table A; Target 97686; HLA-B*07:02; TYR; ENSG00000077498; TAA
HPTNPNLL

SEQ ID NO: 97687 - protein, 8 aa, Homo sapiens
  Table A; Target 97687; HLA-B*08:01; TYR; ENSG00000077498; TAA
HPTNPNLL

SEQ ID NO: 97688 - protein, 8 aa, Homo sapiens
  Table A; Target 97688; HLA-B*35:01; TYR; ENSG00000077498; TAA
HPTNPNLL

SEQ ID NO: 97689 - protein, 8 aa, Homo sapiens
  Table A; Target 97689; HLA-B*35:03; TYR; ENSG00000077498; TAA
HPTNPNLL

SEQ ID NO: 97690 - protein, 8 aa, Homo sapiens
  Table A; Target 97690; HLA-C*07:02; TYR; ENSG00000077498; TAA
HPTNPNLL

SEQ ID NO: 97691 - protein, 10 aa, Homo sapiens
  Table A; Target 97691; HLA-B*54:01; TYR; ENSG00000077498; TAA
HPTNPNLLSP

SEQ ID NO: 97692 - protein, 10 aa, Homo sapiens
  Table A; Target 97692; HLA-B*56:01; TYR; ENSG00000077498; TAA
HPTNPNLLSP

SEQ ID NO: 97693 - protein, 11 aa, Homo sapiens
  Table A; Target 97693; HLA-B*54:01; TYR; ENSG00000077498; TAA
HPTNPNLLSPA

SEQ ID NO: 97694 - protein, 11 aa, Homo sapiens
  Table A; Target 97694; HLA-B*55:01; TYR; ENSG00000077498; TAA
HPTNPNLLSPA

SEQ ID NO: 97695 - protein, 11 aa, Homo sapiens
  Table A; Target 97695; HLA-B*56:01; TYR; ENSG00000077498; TAA
HPTNPNLLSPA

SEQ ID NO: 97696 - protein, 8 aa, Homo sapiens
  Table A; Target 97696; HLA-C*07:01; TYR; ENSG00000077498; TAA
HRPLQEVY

SEQ ID NO: 97697 - protein, 8 aa, Homo sapiens
  Table A; Target 97697; HLA-B*08:01; TYR; ENSG00000077498; TAA
HSLYQSHL

SEQ ID NO: 97698 - protein, 8 aa, Homo sapiens
  Table A; Target 97698; HLA-B*40:02; TYR; ENSG00000077498; TAA
HSLYQSHL

SEQ ID NO: 97699 - protein, 8 aa, Homo sapiens
  Table A; Target 97699; HLA-B*51:01; TYR; ENSG00000077498; TAA
HSLYQSHL

SEQ ID NO: 97700 - protein, 8 aa, Homo sapiens
  Table A; Target 97700; HLA-C*03:03; TYR; ENSG00000077498; TAA
HSLYQSHL

SEQ ID NO: 97701 - protein, 8 aa, Homo sapiens
  Table A; Target 97701; HLA-C*03:04; TYR; ENSG00000077498; TAA
HSLYQSHL

SEQ ID NO: 97702 - protein, 8 aa, Homo sapiens
  Table A; Target 97702; HLA-C*04:01; TYR; ENSG00000077498; TAA
HSLYQSHL

SEQ ID NO: 97703 - protein, 8 aa, Homo sapiens
  Table A; Target 97703; HLA-C*07:01; TYR; ENSG00000077498; TAA
HSLYQSHL

SEQ ID NO: 97704 - protein, 8 aa, Homo sapiens
  Table A; Target 97704; HLA-C*04:01; TYR; ENSG00000077498; TAA
HTISSDYV

SEQ ID NO: 97705 - protein, 9 aa, Homo sapiens
  Table A; Target 97705; HLA-A*68:02; TYR; ENSG00000077498; TAA
HTISSDYVI

SEQ ID NO: 97706 - protein, 9 aa, Homo sapiens
  Table A; Target 97706; HLA-B*13:02; TYR; ENSG00000077498; TAA
HTISSDYVI

SEQ ID NO: 97707 - protein, 9 aa, Homo sapiens
  Table A; Target 97707; HLA-B*35:03; TYR; ENSG00000077498; TAA
HTISSDYVI

SEQ ID NO: 97708 - protein, 9 aa, Homo sapiens
  Table A; Target 97708; HLA-B*38:01; TYR; ENSG00000077498; TAA
HTISSDYVI

SEQ ID NO: 97709 - protein, 9 aa, Homo sapiens
  Table A; Target 97709; HLA-B*57:01; TYR; ENSG00000077498; TAA
HTISSDYVI

SEQ ID NO: 97710 - protein, 9 aa, Homo sapiens
  Table A; Target 97710; HLA-B*58:01; TYR; ENSG00000077498; TAA
HTISSDYVI

SEQ ID NO: 97711 - protein, 9 aa, Homo sapiens
  Table A; Target 97711; HLA-C*07:04; TYR; ENSG00000077498; TAA
HTISSDYVI

SEQ ID NO: 97712 - protein, 11 aa, Homo sapiens
  Table A; Target 97712; HLA-A*68:02; TYR; ENSG00000077498; TAA
HTISSDYVIPI

SEQ ID NO: 97713 - protein, 8 aa, Homo sapiens
  Table A; Target 97713; HLA-B*54:01; TYR; ENSG00000077498; TAA
HYYVSMDA

SEQ ID NO: 97714 - protein, 9 aa, Homo sapiens
  Table A; Target 97714; HLA-A*23:01; TYR; ENSG00000077498; TAA
HYYVSMDAL

SEQ ID NO: 97715 - protein, 9 aa, Homo sapiens
  Table A; Target 97715; HLA-A*24:02; TYR; ENSG00000077498; TAA
HYYVSMDAL

SEQ ID NO: 97716 - protein, 9 aa, Homo sapiens
  Table A; Target 97716; HLA-B*35:03; TYR; ENSG00000077498; TAA
HYYVSMDAL

SEQ ID NO: 97717 - protein, 9 aa, Homo sapiens
  Table A; Target 97717; HLA-C*01:02; TYR; ENSG00000077498; TAA
HYYVSMDAL

SEQ ID NO: 97718 - protein, 9 aa, Homo sapiens
  Table A; Target 97718; HLA-C*04:01; TYR; ENSG00000077498; TAA
HYYVSMDAL

SEQ ID NO: 97719 - protein, 9 aa, Homo sapiens
  Table A; Target 97719; HLA-C*14:02; TYR; ENSG00000077498; TAA
HYYVSMDAL

SEQ ID NO: 97720 - protein, 9 aa, Homo sapiens
  Table A; Target 97720; HLA-A*01:01; TYR; ENSG00000077498; TAA
IADASQSSM

SEQ ID NO: 97721 - protein, 9 aa, Homo sapiens
  Table A; Target 97721; HLA-A*02:07; TYR; ENSG00000077498; TAA
IADASQSSM

SEQ ID NO: 97722 - protein, 9 aa, Homo sapiens
  Table A; Target 97722; HLA-A*32:01; TYR; ENSG00000077498; TAA
IADASQSSM

SEQ ID NO: 97723 - protein, 9 aa, Homo sapiens
  Table A; Target 97723; HLA-B*07:02; TYR; ENSG00000077498; TAA
IADASQSSM

SEQ ID NO: 97724 - protein, 9 aa, Homo sapiens
  Table A; Target 97724; HLA-B*15:01; TYR; ENSG00000077498; TAA
IADASQSSM

SEQ ID NO: 97725 - protein, 9 aa, Homo sapiens
  Table A; Target 97725; HLA-B*15:03; TYR; ENSG00000077498; TAA
IADASQSSM

SEQ ID NO: 97726 - protein, 9 aa, Homo sapiens
  Table A; Target 97726; HLA-B*27:05; TYR; ENSG00000077498; TAA
IADASQSSM

SEQ ID NO: 97727 - protein, 9 aa, Homo sapiens
  Table A; Target 97727; HLA-B*35:01; TYR; ENSG00000077498; TAA
IADASQSSM

SEQ ID NO: 97728 - protein, 9 aa, Homo sapiens
  Table A; Target 97728; HLA-B*35:03; TYR; ENSG00000077498; TAA
IADASQSSM

SEQ ID NO: 97729 - protein, 9 aa, Homo sapiens
  Table A; Target 97729; HLA-B*38:01; TYR; ENSG00000077498; TAA
IADASQSSM

SEQ ID NO: 97730 - protein, 9 aa, Homo sapiens
  Table A; Target 97730; HLA-B*39:01; TYR; ENSG00000077498; TAA
IADASQSSM

SEQ ID NO: 97731 - protein, 9 aa, Homo sapiens
  Table A; Target 97731; HLA-B*40:01; TYR; ENSG00000077498; TAA
IADASQSSM

SEQ ID NO: 97732 - protein, 9 aa, Homo sapiens
  Table A; Target 97732; HLA-B*46:01; TYR; ENSG00000077498; TAA
IADASQSSM

SEQ ID NO: 97733 - protein, 9 aa, Homo sapiens
  Table A; Target 97733; HLA-B*51:01; TYR; ENSG00000077498; TAA
IADASQSSM

SEQ ID NO: 97734 - protein, 9 aa, Homo sapiens
  Table A; Target 97734; HLA-B*55:01; TYR; ENSG00000077498; TAA
IADASQSSM

SEQ ID NO: 97735 - protein, 9 aa, Homo sapiens
  Table A; Target 97735; HLA-B*58:01; TYR; ENSG00000077498; TAA
IADASQSSM

SEQ ID NO: 97736 - protein, 9 aa, Homo sapiens
  Table A; Target 97736; HLA-C*01:02; TYR; ENSG00000077498; TAA
IADASQSSM

SEQ ID NO: 97737 - protein, 9 aa, Homo sapiens
  Table A; Target 97737; HLA-C*02:02; TYR; ENSG00000077498; TAA
IADASQSSM

SEQ ID NO: 97738 - protein, 9 aa, Homo sapiens
  Table A; Target 97738; HLA-C*03:03; TYR; ENSG00000077498; TAA
IADASQSSM

SEQ ID NO: 97739 - protein, 9 aa, Homo sapiens
  Table A; Target 97739; HLA-C*03:04; TYR; ENSG00000077498; TAA
IADASQSSM

SEQ ID NO: 97740 - protein, 9 aa, Homo sapiens
  Table A; Target 97740; HLA-C*04:01; TYR; ENSG00000077498; TAA
IADASQSSM

SEQ ID NO: 97741 - protein, 9 aa, Homo sapiens
  Table A; Target 97741; HLA-C*05:01; TYR; ENSG00000077498; TAA
IADASQSSM

SEQ ID NO: 97742 - protein, 9 aa, Homo sapiens
  Table A; Target 97742; HLA-C*07:02; TYR; ENSG00000077498; TAA
IADASQSSM

SEQ ID NO: 97743 - protein, 9 aa, Homo sapiens
  Table A; Target 97743; HLA-C*07:04; TYR; ENSG00000077498; TAA
IADASQSSM

SEQ ID NO: 97744 - protein, 9 aa, Homo sapiens
  Table A; Target 97744; HLA-C*07:06; TYR; ENSG00000077498; TAA
IADASQSSM

SEQ ID NO: 97745 - protein, 9 aa, Homo sapiens
  Table A; Target 97745; HLA-C*12:03; TYR; ENSG00000077498; TAA
IADASQSSM

SEQ ID NO: 97746 - protein, 9 aa, Homo sapiens
  Table A; Target 97746; HLA-C*14:02; TYR; ENSG00000077498; TAA
IADASQSSM

SEQ ID NO: 97747 - protein, 9 aa, Homo sapiens
  Table A; Target 97747; HLA-C*16:01; TYR; ENSG00000077498; TAA
IADASQSSM

SEQ ID NO: 97748 - protein, 9 aa, Homo sapiens
  Table A; Target 97748; HLA-C*16:02; TYR; ENSG00000077498; TAA
IADASQSSM

SEQ ID NO: 97749 - protein, 10 aa, Homo sapiens
  Table A; Target 97749; HLA-A*30:01; TYR; ENSG00000077498; TAA
IDFAHEAPAF

SEQ ID NO: 97750 - protein, 10 aa, Homo sapiens
  Table A; Target 97750; HLA-B*18:01; TYR; ENSG00000077498; TAA
IDFAHEAPAF

SEQ ID NO: 97751 - protein, 10 aa, Homo sapiens
  Table A; Target 97751; HLA-B*37:01; TYR; ENSG00000077498; TAA
IDFAHEAPAF

SEQ ID NO: 97752 - protein, 9 aa, Homo sapiens
  Table A; Target 97752; HLA-B*27:02; TYR; ENSG00000077498; TAA
IFDLSAPEK

SEQ ID NO: 97753 - protein, 9 aa, Homo sapiens
  Table A; Target 97753; HLA-C*04:01; TYR; ENSG00000077498; TAA
IFDLSAPEK

SEQ ID NO: 97754 - protein, 8 aa, Homo sapiens
  Table A; Target 97754; HLA-A*32:01; TYR; ENSG00000077498; TAA
IGHNRESY

SEQ ID NO: 97755 - protein, 8 aa, Homo sapiens
  Table A; Target 97755; HLA-B*46:01; TYR; ENSG00000077498; TAA
IGHNRESY

SEQ ID NO: 97756 - protein, 8 aa, Homo sapiens
  Table A; Target 97756; HLA-C*16:01; TYR; ENSG00000077498; TAA
IGHNRESY

SEQ ID NO: 97757 - protein, 9 aa, Homo sapiens
  Table A; Target 97757; HLA-A*23:01; TYR; ENSG00000077498; TAA
IPIGTYGQM

SEQ ID NO: 97758 - protein, 9 aa, Homo sapiens
  Table A; Target 97758; HLA-A*25:01; TYR; ENSG00000077498; TAA
IPIGTYGQM

SEQ ID NO: 97759 - protein, 9 aa, Homo sapiens
  Table A; Target 97759; HLA-A*26:01; TYR; ENSG00000077498; TAA
IPIGTYGQM

SEQ ID NO: 97760 - protein, 9 aa, Homo sapiens
  Table A; Target 97760; HLA-B*07:02; TYR; ENSG00000077498; TAA
IPIGTYGQM

SEQ ID NO: 97761 - protein, 9 aa, Homo sapiens
  Table A; Target 97761; HLA-B*35:01; TYR; ENSG00000077498; TAA
IPIGTYGQM

SEQ ID NO: 97762 - protein, 9 aa, Homo sapiens
  Table A; Target 97762; HLA-B*35:03; TYR; ENSG00000077498; TAA
IPIGTYGQM

SEQ ID NO: 97763 - protein, 9 aa, Homo sapiens
  Table A; Target 97763; HLA-B*46:01; TYR; ENSG00000077498; TAA
IPIGTYGQM

SEQ ID NO: 97764 - protein, 9 aa, Homo sapiens
  Table A; Target 97764; HLA-B*51:01; TYR; ENSG00000077498; TAA
IPIGTYGQM

SEQ ID NO: 97765 - protein, 9 aa, Homo sapiens
  Table A; Target 97765; HLA-B*54:01; TYR; ENSG00000077498; TAA
IPIGTYGQM

SEQ ID NO: 97766 - protein, 9 aa, Homo sapiens
  Table A; Target 97766; HLA-B*55:01; TYR; ENSG00000077498; TAA
IPIGTYGQM

SEQ ID NO: 97767 - protein, 9 aa, Homo sapiens
  Table A; Target 97767; HLA-B*56:01; TYR; ENSG00000077498; TAA
IPIGTYGQM

SEQ ID NO: 97768 - protein, 9 aa, Homo sapiens
  Table A; Target 97768; HLA-C*03:03; TYR; ENSG00000077498; TAA
IPIGTYGQM

SEQ ID NO: 97769 - protein, 9 aa, Homo sapiens
  Table A; Target 97769; HLA-C*04:01; TYR; ENSG00000077498; TAA
IPIGTYGQM

SEQ ID NO: 97770 - protein, 9 aa, Homo sapiens
  Table A; Target 97770; HLA-C*07:02; TYR; ENSG00000077498; TAA
IPIGTYGQM

SEQ ID NO: 97771 - protein, 9 aa, Homo sapiens
  Table A; Target 97771; HLA-C*14:02; TYR; ENSG00000077498; TAA
IPIGTYGQM

SEQ ID NO: 97772 - protein, 10 aa, Homo sapiens
  Table A; Target 97772; HLA-A*68:01; TYR; ENSG00000077498; TAA
IPIGTYGQMK

SEQ ID NO: 97773 - protein, 10 aa, Homo sapiens
  Table A; Target 97773; HLA-B*35:03; TYR; ENSG00000077498; TAA
IPIGTYGQMK

SEQ ID NO: 97774 - protein, 10 aa, Homo sapiens
  Table A; Target 97774; HLA-B*56:01; TYR; ENSG00000077498; TAA
IPIGTYGQMK

SEQ ID NO: 97775 - protein, 10 aa, Homo sapiens
  Table A; Target 97775; HLA-B*15:01; TYR; ENSG00000077498; TAA
IQKLTGDENF

SEQ ID NO: 97776 - protein, 9 aa, Homo sapiens
  Table A; Target 97776; HLA-A*02:01; TYR; ENSG00000077498; TAA
ISSDYVIPI

SEQ ID NO: 97777 - protein, 9 aa, Homo sapiens
  Table A; Target 97777; HLA-A*11:01; TYR; ENSG00000077498; TAA
ISSDYVIPI

SEQ ID NO: 97778 - protein, 9 aa, Homo sapiens
  Table A; Target 97778; HLA-A*31:01; TYR; ENSG00000077498; TAA
ISSDYVIPI

SEQ ID NO: 97779 - protein, 9 aa, Homo sapiens
  Table A; Target 97779; HLA-A*68:01; TYR; ENSG00000077498; TAA
ISSDYVIPI

SEQ ID NO: 97780 - protein, 9 aa, Homo sapiens
  Table A; Target 97780; HLA-A*68:02; TYR; ENSG00000077498; TAA
ISSDYVIPI

SEQ ID NO: 97781 - protein, 9 aa, Homo sapiens
  Table A; Target 97781; HLA-B*57:01; TYR; ENSG00000077498; TAA
ISSDYVIPI

SEQ ID NO: 97782 - protein, 9 aa, Homo sapiens
  Table A; Target 97782; HLA-C*02:02; TYR; ENSG00000077498; TAA
ISSDYVIPI

SEQ ID NO: 97783 - protein, 9 aa, Homo sapiens
  Table A; Target 97783; HLA-C*04:01; TYR; ENSG00000077498; TAA
ISSDYVIPI

SEQ ID NO: 97784 - protein, 9 aa, Homo sapiens
  Table A; Target 97784; HLA-C*07:04; TYR; ENSG00000077498; TAA
ISSDYVIPI

SEQ ID NO: 97785 - protein, 9 aa, Homo sapiens
  Table A; Target 97785; HLA-C*12:03; TYR; ENSG00000077498; TAA
ISSDYVIPI

SEQ ID NO: 97786 - protein, 8 aa, Homo sapiens
  Table A; Target 97786; HLA-A*01:01; TYR; ENSG00000077498; TAA
ISSKDLGY

SEQ ID NO: 97787 - protein, 8 aa, Homo sapiens
  Table A; Target 97787; HLA-B*58:01; TYR; ENSG00000077498; TAA
ISSKDLGY

SEQ ID NO: 97788 - protein, 10 aa, Homo sapiens
  Table A; Target 97788; HLA-A*01:01; TYR; ENSG00000077498; TAA
ISSKDLGYDY

SEQ ID NO: 97789 - protein, 10 aa, Homo sapiens
  Table A; Target 97789; HLA-A*29:02; TYR; ENSG00000077498; TAA
ISSKDLGYDY

SEQ ID NO: 97790 - protein, 10 aa, Homo sapiens
  Table A; Target 97790; HLA-A*30:02; TYR; ENSG00000077498; TAA
ISSKDLGYDY

SEQ ID NO: 97791 - protein, 10 aa, Homo sapiens
  Table A; Target 97791; HLA-B*57:01; TYR; ENSG00000077498; TAA
ISSKDLGYDY

SEQ ID NO: 97792 - protein, 10 aa, Homo sapiens
  Table A; Target 97792; HLA-B*58:01; TYR; ENSG00000077498; TAA
ISSKDLGYDY

SEQ ID NO: 97793 - protein, 9 aa, Homo sapiens
  Table A; Target 97793; HLA-A*01:01; TYR; ENSG00000077498; TAA
IVCSRLEEY

SEQ ID NO: 97794 - protein, 9 aa, Homo sapiens
  Table A; Target 97794; HLA-A*03:01; TYR; ENSG00000077498; TAA
IVCSRLEEY

SEQ ID NO: 97795 - protein, 9 aa, Homo sapiens
  Table A; Target 97795; HLA-A*25:01; TYR; ENSG00000077498; TAA
IVCSRLEEY

SEQ ID NO: 97796 - protein, 9 aa, Homo sapiens
  Table A; Target 97796; HLA-A*26:01; TYR; ENSG00000077498; TAA
IVCSRLEEY

SEQ ID NO: 97797 - protein, 9 aa, Homo sapiens
  Table A; Target 97797; HLA-A*29:02; TYR; ENSG00000077498; TAA
IVCSRLEEY

SEQ ID NO: 97798 - protein, 9 aa, Homo sapiens
  Table A; Target 97798; HLA-A*30:02; TYR; ENSG00000077498; TAA
IVCSRLEEY

SEQ ID NO: 97799 - protein, 9 aa, Homo sapiens
  Table A; Target 97799; HLA-A*32:01; TYR; ENSG00000077498; TAA
IVCSRLEEY

SEQ ID NO: 97800 - protein, 9 aa, Homo sapiens
  Table A; Target 97800; HLA-B*15:01; TYR; ENSG00000077498; TAA
IVCSRLEEY

SEQ ID NO: 97801 - protein, 9 aa, Homo sapiens
  Table A; Target 97801; HLA-B*46:01; TYR; ENSG00000077498; TAA
IVCSRLEEY

SEQ ID NO: 97802 - protein, 9 aa, Homo sapiens
  Table A; Target 97802; HLA-C*07:01; TYR; ENSG00000077498; TAA
IVCSRLEEY

SEQ ID NO: 97803 - protein, 9 aa, Homo sapiens
  Table A; Target 97803; HLA-C*12:03; TYR; ENSG00000077498; TAA
IVCSRLEEY

SEQ ID NO: 97804 - protein, 9 aa, Homo sapiens
  Table A; Target 97804; HLA-A*23:01; TYR; ENSG00000077498; TAA
IYMNGTMSQ

SEQ ID NO: 97805 - protein, 9 aa, Homo sapiens
  Table A; Target 97805; HLA-A*24:02; TYR; ENSG00000077498; TAA
IYMNGTMSQ

SEQ ID NO: 97806 - protein, 9 aa, Homo sapiens
  Table A; Target 97806; HLA-C*01:02; TYR; ENSG00000077498; TAA
IYMNGTMSQ

SEQ ID NO: 97807 - protein, 9 aa, Homo sapiens
  Table A; Target 97807; HLA-C*14:02; TYR; ENSG00000077498; TAA
IYMNGTMSQ

SEQ ID NO: 97808 - protein, 10 aa, Homo sapiens
  Table A; Target 97808; HLA-A*02:01; TYR; ENSG00000077498; TAA
IYMNGTMSQV

SEQ ID NO: 97809 - protein, 10 aa, Homo sapiens
  Table A; Target 97809; HLA-A*23:01; TYR; ENSG00000077498; TAA
IYMNGTMSQV

SEQ ID NO: 97810 - protein, 10 aa, Homo sapiens
  Table A; Target 97810; HLA-A*24:02; TYR; ENSG00000077498; TAA
IYMNGTMSQV

SEQ ID NO: 97811 - protein, 10 aa, Homo sapiens
  Table A; Target 97811; HLA-A*32:01; TYR; ENSG00000077498; TAA
IYMNGTMSQV

SEQ ID NO: 97812 - protein, 10 aa, Homo sapiens
  Table A; Target 97812; HLA-C*01:02; TYR; ENSG00000077498; TAA
IYMNGTMSQV

SEQ ID NO: 97813 - protein, 10 aa, Homo sapiens
  Table A; Target 97813; HLA-C*04:01; TYR; ENSG00000077498; TAA
IYMNGTMSQV

SEQ ID NO: 97814 - protein, 10 aa, Homo sapiens
  Table A; Target 97814; HLA-C*06:02; TYR; ENSG00000077498; TAA
IYMNGTMSQV

SEQ ID NO: 97815 - protein, 10 aa, Homo sapiens
  Table A; Target 97815; HLA-C*07:02; TYR; ENSG00000077498; TAA
IYMNGTMSQV

SEQ ID NO: 97816 - protein, 10 aa, Homo sapiens
  Table A; Target 97816; HLA-C*14:02; TYR; ENSG00000077498; TAA
IYMNGTMSQV

SEQ ID NO: 97817 - protein, 11 aa, Homo sapiens
  Table A; Target 97817; HLA-A*24:02; TYR; ENSG00000077498; TAA
IYMNGTMSQVQ

SEQ ID NO: 97818 - protein, 11 aa, Homo sapiens
  Table A; Target 97818; HLA-C*07:01; TYR; ENSG00000077498; TAA
IYMNGTMSQVQ

SEQ ID NO: 97819 - protein, 9 aa, Homo sapiens
  Table A; Target 97819; HLA-A*01:01; TYR; ENSG00000077498; TAA
KCDICTDEY

SEQ ID NO: 97820 - protein, 9 aa, Homo sapiens
  Table A; Target 97820; HLA-A*29:02; TYR; ENSG00000077498; TAA
KDLGYDYSY

SEQ ID NO: 97821 - protein, 9 aa, Homo sapiens
  Table A; Target 97821; HLA-A*30:02; TYR; ENSG00000077498; TAA
KDLGYDYSY

SEQ ID NO: 97822 - protein, 9 aa, Homo sapiens
  Table A; Target 97822; HLA-B*27:02; TYR; ENSG00000077498; TAA
KDLGYDYSY

SEQ ID NO: 97823 - protein, 9 aa, Homo sapiens
  Table A; Target 97823; HLA-C*16:04; TYR; ENSG00000077498; TAA
KDLGYDYSY

SEQ ID NO: 97824 - protein, 8 aa, Homo sapiens
  Table A; Target 97824; HLA-B*44:02; TYR; ENSG00000077498; TAA
KEDYHSLY

SEQ ID NO: 97825 - protein, 8 aa, Homo sapiens
  Table A; Target 97825; HLA-C*04:01; TYR; ENSG00000077498; TAA
KEDYHSLY

SEQ ID NO: 97826 - protein, 8 aa, Homo sapiens
  Table A; Target 97826; HLA-B*15:03; TYR; ENSG00000077498; TAA
KHTISSDY

SEQ ID NO: 97827 - protein, 9 aa, Homo sapiens
  Table A; Target 97827; HLA-B*38:01; TYR; ENSG00000077498; TAA
KHTISSDYV

SEQ ID NO: 97828 - protein, 10 aa, Homo sapiens
  Table A; Target 97828; HLA-B*38:01; TYR; ENSG00000077498; TAA
KHTISSDYVI

SEQ ID NO: 97829 - protein, 8 aa, Homo sapiens
  Table A; Target 97829; HLA-C*07:01; TYR; ENSG00000077498; TAA
KNGSTPMF

SEQ ID NO: 97830 - protein, 8 aa, Homo sapiens
  Table A; Target 97830; HLA-C*07:02; TYR; ENSG00000077498; TAA
KNGSTPMF

SEQ ID NO: 97831 - protein, 10 aa, Homo sapiens
  Table A; Target 97831; HLA-A*31:01; TYR; ENSG00000077498; TAA
KQLPEEKQPL

SEQ ID NO: 97832 - protein, 10 aa, Homo sapiens
  Table A; Target 97832; HLA-B*15:01; TYR; ENSG00000077498; TAA
KQLPEEKQPL

SEQ ID NO: 97833 - protein, 10 aa, Homo sapiens
  Table A; Target 97833; HLA-B*38:01; TYR; ENSG00000077498; TAA
KQLPEEKQPL

SEQ ID NO: 97834 - protein, 10 aa, Homo sapiens
  Table A; Target 97834; HLA-B*40:01; TYR; ENSG00000077498; TAA
KQLPEEKQPL

SEQ ID NO: 97835 - protein, 10 aa, Homo sapiens
  Table A; Target 97835; HLA-B*40:02; TYR; ENSG00000077498; TAA
KQLPEEKQPL

SEQ ID NO: 97836 - protein, 11 aa, Homo sapiens
  Table A; Target 97836; HLA-A*02:01; TYR; ENSG00000077498; TAA
KQLPEEKQPLL

SEQ ID NO: 97837 - protein, 11 aa, Homo sapiens
  Table A; Target 97837; HLA-A*02:04; TYR; ENSG00000077498; TAA
KQLPEEKQPLL

SEQ ID NO: 97838 - protein, 11 aa, Homo sapiens
  Table A; Target 97838; HLA-A*02:07; TYR; ENSG00000077498; TAA
KQLPEEKQPLL

SEQ ID NO: 97839 - protein, 11 aa, Homo sapiens
  Table A; Target 97839; HLA-A*24:02; TYR; ENSG00000077498; TAA
KQLPEEKQPLL

SEQ ID NO: 97840 - protein, 11 aa, Homo sapiens
  Table A; Target 97840; HLA-A*30:01; TYR; ENSG00000077498; TAA
KQLPEEKQPLL

SEQ ID NO: 97841 - protein, 11 aa, Homo sapiens
  Table A; Target 97841; HLA-A*31:01; TYR; ENSG00000077498; TAA
KQLPEEKQPLL

SEQ ID NO: 97842 - protein, 11 aa, Homo sapiens
  Table A; Target 97842; HLA-A*32:01; TYR; ENSG00000077498; TAA
KQLPEEKQPLL

SEQ ID NO: 97843 - protein, 11 aa, Homo sapiens
  Table A; Target 97843; HLA-B*13:02; TYR; ENSG00000077498; TAA
KQLPEEKQPLL

SEQ ID NO: 97844 - protein, 9 aa, Homo sapiens
  Table A; Target 97844; HLA-A*03:01; TYR; ENSG00000077498; TAA
KSYLEQASR

SEQ ID NO: 97845 - protein, 9 aa, Homo sapiens
  Table A; Target 97845; HLA-A*11:01; TYR; ENSG00000077498; TAA
KSYLEQASR

SEQ ID NO: 97846 - protein, 9 aa, Homo sapiens
  Table A; Target 97846; HLA-A*31:01; TYR; ENSG00000077498; TAA
KSYLEQASR

SEQ ID NO: 97847 - protein, 9 aa, Homo sapiens
  Table A; Target 97847; HLA-A*33:01; TYR; ENSG00000077498; TAA
KSYLEQASR

SEQ ID NO: 97848 - protein, 9 aa, Homo sapiens
  Table A; Target 97848; HLA-B*57:01; TYR; ENSG00000077498; TAA
KSYLEQASR

SEQ ID NO: 97849 - protein, 9 aa, Homo sapiens
  Table A; Target 97849; HLA-C*07:06; TYR; ENSG00000077498; TAA
KSYLEQASR

SEQ ID NO: 97850 - protein, 11 aa, Homo sapiens
  Table A; Target 97850; HLA-B*57:01; TYR; ENSG00000077498; TAA
KSYLEQASRIW

SEQ ID NO: 97851 - protein, 8 aa, Homo sapiens
  Table A; Target 97851; HLA-B*08:01; TYR; ENSG00000077498; TAA
LAGLVSLL

SEQ ID NO: 97852 - protein, 8 aa, Homo sapiens
  Table A; Target 97852; HLA-B*35:03; TYR; ENSG00000077498; TAA
LAGLVSLL

SEQ ID NO: 97853 - protein, 8 aa, Homo sapiens
  Table A; Target 97853; HLA-B*51:01; TYR; ENSG00000077498; TAA
LAGLVSLL

SEQ ID NO: 97854 - protein, 8 aa, Homo sapiens
  Table A; Target 97854; HLA-C*05:01; TYR; ENSG00000077498; TAA
LAGLVSLL

SEQ ID NO: 97855 - protein, 8 aa, Homo sapiens
  Table A; Target 97855; HLA-C*06:02; TYR; ENSG00000077498; TAA
LAGLVSLL

SEQ ID NO: 97856 - protein, 8 aa, Homo sapiens
  Table A; Target 97856; HLA-C*07:01; TYR; ENSG00000077498; TAA
LAGLVSLL

SEQ ID NO: 97857 - protein, 8 aa, Homo sapiens
  Table A; Target 97857; HLA-C*07:04; TYR; ENSG00000077498; TAA
LAGLVSLL

SEQ ID NO: 97858 - protein, 8 aa, Homo sapiens
  Table A; Target 97858; HLA-C*12:03; TYR; ENSG00000077498; TAA
LAGLVSLL

SEQ ID NO: 97859 - protein, 9 aa, Homo sapiens
  Table A; Target 97859; HLA-B*57:01; TYR; ENSG00000077498; TAA
LAVLYCLLW

SEQ ID NO: 97860 - protein, 10 aa, Homo sapiens
  Table A; Target 97860; HLA-A*30:01; TYR; ENSG00000077498; TAA
LEEYNSHQSL

SEQ ID NO: 97861 - protein, 10 aa, Homo sapiens
  Table A; Target 97861; HLA-B*27:05; TYR; ENSG00000077498; TAA
LEEYNSHQSL

SEQ ID NO: 97862 - protein, 10 aa, Homo sapiens
  Table A; Target 97862; HLA-B*37:01; TYR; ENSG00000077498; TAA
LEEYNSHQSL

SEQ ID NO: 97863 - protein, 10 aa, Homo sapiens
  Table A; Target 97863; HLA-B*38:01; TYR; ENSG00000077498; TAA
LEEYNSHQSL

SEQ ID NO: 97864 - protein, 10 aa, Homo sapiens
  Table A; Target 97864; HLA-B*40:01; TYR; ENSG00000077498; TAA
LEEYNSHQSL

SEQ ID NO: 97865 - protein, 10 aa, Homo sapiens
  Table A; Target 97865; HLA-B*40:02; TYR; ENSG00000077498; TAA
LEEYNSHQSL

SEQ ID NO: 97866 - protein, 10 aa, Homo sapiens
  Table A; Target 97866; HLA-B*44:02; TYR; ENSG00000077498; TAA
LEEYNSHQSL

SEQ ID NO: 97867 - protein, 10 aa, Homo sapiens
  Table A; Target 97867; HLA-B*44:03; TYR; ENSG00000077498; TAA
LEEYNSHQSL

SEQ ID NO: 97868 - protein, 10 aa, Homo sapiens
  Table A; Target 97868; HLA-B*49:01; TYR; ENSG00000077498; TAA
LEEYNSHQSL

SEQ ID NO: 97869 - protein, 10 aa, Homo sapiens
  Table A; Target 97869; HLA-C*07:04; TYR; ENSG00000077498; TAA
LEEYNSHQSL

SEQ ID NO: 97870 - protein, 10 aa, Homo sapiens
  Table A; Target 97870; HLA-C*16:04; TYR; ENSG00000077498; TAA
LEEYNSHQSL

SEQ ID NO: 97871 - protein, 8 aa, Homo sapiens
  Table A; Target 97871; HLA-B*18:01; TYR; ENSG00000077498; TAA
LEGFASPL

SEQ ID NO: 97872 - protein, 8 aa, Homo sapiens
  Table A; Target 97872; HLA-B*40:01; TYR; ENSG00000077498; TAA
LEGFASPL

SEQ ID NO: 97873 - protein, 8 aa, Homo sapiens
  Table A; Target 97873; HLA-B*49:01; TYR; ENSG00000077498; TAA
LEGFASPL

SEQ ID NO: 97874 - protein, 8 aa, Homo sapiens
  Table A; Target 97874; HLA-C*12:03; TYR; ENSG00000077498; TAA
LEGFASPL

SEQ ID NO: 97875 - protein, 9 aa, Homo sapiens
  Table A; Target 97875; HLA-B*40:02; TYR; ENSG00000077498; TAA
LEGFASPLT

SEQ ID NO: 97876 - protein, 9 aa, Homo sapiens
  Table A; Target 97876; HLA-B*49:01; TYR; ENSG00000077498; TAA
LEGFASPLT

SEQ ID NO: 97877 - protein, 11 aa, Homo sapiens
  Table A; Target 97877; HLA-B*40:02; TYR; ENSG00000077498; TAA
LEGFASPLTGI

SEQ ID NO: 97878 - protein, 11 aa, Homo sapiens
  Table A; Target 97878; HLA-B*49:01; TYR; ENSG00000077498; TAA
LEGFASPLTGI

SEQ ID NO: 97879 - protein, 8 aa, Homo sapiens
  Table A; Target 97879; HLA-B*44:02; TYR; ENSG00000077498; TAA
LEQASRIW

SEQ ID NO: 97880 - protein, 10 aa, Homo sapiens
  Table A; Target 97880; HLA-B*44:02; TYR; ENSG00000077498; TAA
LEQASRIWSW

SEQ ID NO: 97881 - protein, 10 aa, Homo sapiens
  Table A; Target 97881; HLA-B*44:03; TYR; ENSG00000077498; TAA
LEQASRIWSW

SEQ ID NO: 97882 - protein, 9 aa, Homo sapiens
  Table A; Target 97882; HLA-C*06:02; TYR; ENSG00000077498; TAA
LGAAMVGAV

SEQ ID NO: 97883 - protein, 10 aa, Homo sapiens
  Table A; Target 97883; HLA-C*03:03; TYR; ENSG00000077498; TAA
LGAAMVGAVL

SEQ ID NO: 97884 - protein, 10 aa, Homo sapiens
  Table A; Target 97884; HLA-C*03:04; TYR; ENSG00000077498; TAA
LGAAMVGAVL

SEQ ID NO: 97885 - protein, 10 aa, Homo sapiens
  Table A; Target 97885; HLA-A*02:07; TYR; ENSG00000077498; TAA
LGPQFPFTGV

SEQ ID NO: 97886 - protein, 8 aa, Homo sapiens
  Table A; Target 97886; HLA-A*02:01; TYR; ENSG00000077498; TAA
LLAGLVSL

SEQ ID NO: 97887 - protein, 8 aa, Homo sapiens
  Table A; Target 97887; HLA-A*02:04; TYR; ENSG00000077498; TAA
LLAGLVSL

SEQ ID NO: 97888 - protein, 9 aa, Homo sapiens
  Table A; Target 97888; HLA-A*01:01; TYR; ENSG00000077498; TAA
LLAGLVSLL

SEQ ID NO: 97889 - protein, 9 aa, Homo sapiens
  Table A; Target 97889; HLA-A*02:01; TYR; ENSG00000077498; TAA
LLAGLVSLL

SEQ ID NO: 97890 - protein, 9 aa, Homo sapiens
  Table A; Target 97890; HLA-A*02:03; TYR; ENSG00000077498; TAA
LLAGLVSLL

SEQ ID NO: 97891 - protein, 9 aa, Homo sapiens
  Table A; Target 97891; HLA-A*02:04; TYR; ENSG00000077498; TAA
LLAGLVSLL

SEQ ID NO: 97892 - protein, 9 aa, Homo sapiens
  Table A; Target 97892; HLA-A*02:07; TYR; ENSG00000077498; TAA
LLAGLVSLL

SEQ ID NO: 97893 - protein, 9 aa, Homo sapiens
  Table A; Target 97893; HLA-A*23:01; TYR; ENSG00000077498; TAA
LLAGLVSLL

SEQ ID NO: 97894 - protein, 9 aa, Homo sapiens
  Table A; Target 97894; HLA-A*24:02; TYR; ENSG00000077498; TAA
LLAGLVSLL

SEQ ID NO: 97895 - protein, 9 aa, Homo sapiens
  Table A; Target 97895; HLA-A*68:02; TYR; ENSG00000077498; TAA
LLAGLVSLL

SEQ ID NO: 97896 - protein, 9 aa, Homo sapiens
  Table A; Target 97896; HLA-B*07:02; TYR; ENSG00000077498; TAA
LLAGLVSLL

SEQ ID NO: 97897 - protein, 9 aa, Homo sapiens
  Table A; Target 97897; HLA-B*13:02; TYR; ENSG00000077498; TAA
LLAGLVSLL

SEQ ID NO: 97898 - protein, 9 aa, Homo sapiens
  Table A; Target 97898; HLA-B*55:01; TYR; ENSG00000077498; TAA
LLAGLVSLL

SEQ ID NO: 97899 - protein, 9 aa, Homo sapiens
  Table A; Target 97899; HLA-C*02:02; TYR; ENSG00000077498; TAA
LLAGLVSLL

SEQ ID NO: 97900 - protein, 9 aa, Homo sapiens
  Table A; Target 97900; HLA-C*06:02; TYR; ENSG00000077498; TAA
LLAGLVSLL

SEQ ID NO: 97901 - protein, 9 aa, Homo sapiens
  Table A; Target 97901; HLA-C*07:01; TYR; ENSG00000077498; TAA
LLAGLVSLL

SEQ ID NO: 97902 - protein, 9 aa, Homo sapiens
  Table A; Target 97902; HLA-C*07:04; TYR; ENSG00000077498; TAA
LLAGLVSLL

SEQ ID NO: 97903 - protein, 9 aa, Homo sapiens
  Table A; Target 97903; HLA-C*12:03; TYR; ENSG00000077498; TAA
LLAGLVSLL

SEQ ID NO: 97904 - protein, 8 aa, Homo sapiens
  Table A; Target 97904; HLA-C*07:01; TYR; ENSG00000077498; TAA
LLGAAMVG

SEQ ID NO: 97905 - protein, 8 aa, Homo sapiens
  Table A; Target 97905; HLA-C*07:04; TYR; ENSG00000077498; TAA
LLGAAMVG

SEQ ID NO: 97906 - protein, 8 aa, Homo sapiens
  Table A; Target 97906; HLA-C*12:03; TYR; ENSG00000077498; TAA
LLGAAMVG

SEQ ID NO: 97907 - protein, 9 aa, Homo sapiens
  Table A; Target 97907; HLA-A*02:01; TYR; ENSG00000077498; TAA
LLGAAMVGA

SEQ ID NO: 97908 - protein, 9 aa, Homo sapiens
  Table A; Target 97908; HLA-A*02:03; TYR; ENSG00000077498; TAA
LLGAAMVGA

SEQ ID NO: 97909 - protein, 10 aa, Homo sapiens
  Table A; Target 97909; HLA-A*02:03; TYR; ENSG00000077498; TAA
LLGAAMVGAV

SEQ ID NO: 97910 - protein, 8 aa, Homo sapiens
  Table A; Target 97910; HLA-B*08:01; TYR; ENSG00000077498; TAA
LLMEKEDY

SEQ ID NO: 97911 - protein, 8 aa, Homo sapiens
  Table A; Target 97911; HLA-B*15:01; TYR; ENSG00000077498; TAA
LLMEKEDY

SEQ ID NO: 97912 - protein, 11 aa, Homo sapiens
  Table A; Target 97912; HLA-A*02:01; TYR; ENSG00000077498; TAA
LLMEKEDYHSL

SEQ ID NO: 97913 - protein, 11 aa, Homo sapiens
  Table A; Target 97913; HLA-A*02:04; TYR; ENSG00000077498; TAA
LLMEKEDYHSL

SEQ ID NO: 97914 - protein, 11 aa, Homo sapiens
  Table A; Target 97914; HLA-A*02:07; TYR; ENSG00000077498; TAA
LLMEKEDYHSL

SEQ ID NO: 97915 - protein, 9 aa, Homo sapiens
  Table A; Target 97915; HLA-C*06:02; TYR; ENSG00000077498; TAA
LLSNAPLGP

SEQ ID NO: 97916 - protein, 11 aa, Homo sapiens
  Table A; Target 97916; HLA-A*24:02; TYR; ENSG00000077498; TAA
LLSPASFFSSW

SEQ ID NO: 97917 - protein, 9 aa, Homo sapiens
  Table A; Target 97917; HLA-A*02:01; TYR; ENSG00000077498; TAA
LLWSFQTSA

SEQ ID NO: 97918 - protein, 9 aa, Homo sapiens
  Table A; Target 97918; HLA-A*02:03; TYR; ENSG00000077498; TAA
LLWSFQTSA

SEQ ID NO: 97919 - protein, 9 aa, Homo sapiens
  Table A; Target 97919; HLA-A*02:04; TYR; ENSG00000077498; TAA
LLWSFQTSA

SEQ ID NO: 97920 - protein, 9 aa, Homo sapiens
  Table A; Target 97920; HLA-A*02:07; TYR; ENSG00000077498; TAA
LLWSFQTSA

SEQ ID NO: 97921 - protein, 9 aa, Homo sapiens
  Table A; Target 97921; HLA-B*13:02; TYR; ENSG00000077498; TAA
LLWSFQTSA

SEQ ID NO: 97922 - protein, 9 aa, Homo sapiens
  Table A; Target 97922; HLA-B*54:01; TYR; ENSG00000077498; TAA
LLWSFQTSA

SEQ ID NO: 97923 - protein, 9 aa, Homo sapiens
  Table A; Target 97923; HLA-B*55:01; TYR; ENSG00000077498; TAA
LLWSFQTSA

SEQ ID NO: 97924 - protein, 11 aa, Homo sapiens
  Table A; Target 97924; HLA-A*01:01; TYR; ENSG00000077498; TAA
LMEKEDYHSLY

SEQ ID NO: 97925 - protein, 8 aa, Homo sapiens
  Table A; Target 97925; HLA-B*07:02; TYR; ENSG00000077498; TAA
LPEEKQPL

SEQ ID NO: 97926 - protein, 8 aa, Homo sapiens
  Table A; Target 97926; HLA-B*08:01; TYR; ENSG00000077498; TAA
LPEEKQPL

SEQ ID NO: 97927 - protein, 9 aa, Homo sapiens
  Table A; Target 97927; HLA-B*07:02; TYR; ENSG00000077498; TAA
LPEEKQPLL

SEQ ID NO: 97928 - protein, 9 aa, Homo sapiens
  Table A; Target 97928; HLA-B*08:01; TYR; ENSG00000077498; TAA
LPEEKQPLL

SEQ ID NO: 97929 - protein, 9 aa, Homo sapiens
  Table A; Target 97929; HLA-B*35:01; TYR; ENSG00000077498; TAA
LPEEKQPLL

SEQ ID NO: 97930 - protein, 9 aa, Homo sapiens
  Table A; Target 97930; HLA-B*35:03; TYR; ENSG00000077498; TAA
LPEEKQPLL

SEQ ID NO: 97931 - protein, 9 aa, Homo sapiens
  Table A; Target 97931; HLA-B*38:01; TYR; ENSG00000077498; TAA
LPEEKQPLL

SEQ ID NO: 97932 - protein, 9 aa, Homo sapiens
  Table A; Target 97932; HLA-B*39:01; TYR; ENSG00000077498; TAA
LPEEKQPLL

SEQ ID NO: 97933 - protein, 9 aa, Homo sapiens
  Table A; Target 97933; HLA-B*51:01; TYR; ENSG00000077498; TAA
LPEEKQPLL

SEQ ID NO: 97934 - protein, 9 aa, Homo sapiens
  Table A; Target 97934; HLA-B*54:01; TYR; ENSG00000077498; TAA
LPEEKQPLL

SEQ ID NO: 97935 - protein, 9 aa, Homo sapiens
  Table A; Target 97935; HLA-B*55:01; TYR; ENSG00000077498; TAA
LPEEKQPLL

SEQ ID NO: 97936 - protein, 9 aa, Homo sapiens
  Table A; Target 97936; HLA-B*56:01; TYR; ENSG00000077498; TAA
LPEEKQPLL

SEQ ID NO: 97937 - protein, 9 aa, Homo sapiens
  Table A; Target 97937; HLA-C*03:03; TYR; ENSG00000077498; TAA
LPEEKQPLL

SEQ ID NO: 97938 - protein, 9 aa, Homo sapiens
  Table A; Target 97938; HLA-C*05:01; TYR; ENSG00000077498; TAA
LPEEKQPLL

SEQ ID NO: 97939 - protein, 9 aa, Homo sapiens
  Table A; Target 97939; HLA-C*07:02; TYR; ENSG00000077498; TAA
LPEEKQPLL

SEQ ID NO: 97940 - protein, 9 aa, Homo sapiens
  Table A; Target 97940; HLA-C*16:02; TYR; ENSG00000077498; TAA
LPEEKQPLL

SEQ ID NO: 97941 - protein, 10 aa, Homo sapiens
  Table A; Target 97941; HLA-B*35:01; TYR; ENSG00000077498; TAA
LPEEKQPLLM

SEQ ID NO: 97942 - protein, 10 aa, Homo sapiens
  Table A; Target 97942; HLA-B*35:03; TYR; ENSG00000077498; TAA
LPEEKQPLLM

SEQ ID NO: 97943 - protein, 10 aa, Homo sapiens
  Table A; Target 97943; HLA-B*51:01; TYR; ENSG00000077498; TAA
LPEEKQPLLM

SEQ ID NO: 97944 - protein, 10 aa, Homo sapiens
  Table A; Target 97944; HLA-B*55:01; TYR; ENSG00000077498; TAA
LPEEKQPLLM

SEQ ID NO: 97945 - protein, 10 aa, Homo sapiens
  Table A; Target 97945; HLA-C*03:03; TYR; ENSG00000077498; TAA
LPEEKQPLLM

SEQ ID NO: 97946 - protein, 9 aa, Homo sapiens
  Table A; Target 97946; HLA-B*07:02; TYR; ENSG00000077498; TAA
LPSSADVEF

SEQ ID NO: 97947 - protein, 9 aa, Homo sapiens
  Table A; Target 97947; HLA-B*35:01; TYR; ENSG00000077498; TAA
LPSSADVEF

SEQ ID NO: 97948 - protein, 9 aa, Homo sapiens
  Table A; Target 97948; HLA-B*35:03; TYR; ENSG00000077498; TAA
LPSSADVEF

SEQ ID NO: 97949 - protein, 9 aa, Homo sapiens
  Table A; Target 97949; HLA-B*38:01; TYR; ENSG00000077498; TAA
LPSSADVEF

SEQ ID NO: 97950 - protein, 9 aa, Homo sapiens
  Table A; Target 97950; HLA-B*51:01; TYR; ENSG00000077498; TAA
LPSSADVEF

SEQ ID NO: 97951 - protein, 9 aa, Homo sapiens
  Table A; Target 97951; HLA-B*54:01; TYR; ENSG00000077498; TAA
LPSSADVEF

SEQ ID NO: 97952 - protein, 9 aa, Homo sapiens
  Table A; Target 97952; HLA-B*55:01; TYR; ENSG00000077498; TAA
LPSSADVEF

SEQ ID NO: 97953 - protein, 9 aa, Homo sapiens
  Table A; Target 97953; HLA-B*56:01; TYR; ENSG00000077498; TAA
LPSSADVEF

SEQ ID NO: 97954 - protein, 9 aa, Homo sapiens
  Table A; Target 97954; HLA-C*03:03; TYR; ENSG00000077498; TAA
LPSSADVEF

SEQ ID NO: 97955 - protein, 9 aa, Homo sapiens
  Table A; Target 97955; HLA-C*04:01; TYR; ENSG00000077498; TAA
LPSSADVEF

SEQ ID NO: 97956 - protein, 9 aa, Homo sapiens
  Table A; Target 97956; HLA-C*05:01; TYR; ENSG00000077498; TAA
LPSSADVEF

SEQ ID NO: 97957 - protein, 9 aa, Homo sapiens
  Table A; Target 97957; HLA-C*07:02; TYR; ENSG00000077498; TAA
LPSSADVEF

SEQ ID NO: 97958 - protein, 9 aa, Homo sapiens
  Table A; Target 97958; HLA-C*07:04; TYR; ENSG00000077498; TAA
LPSSADVEF

SEQ ID NO: 97959 - protein, 9 aa, Homo sapiens
  Table A; Target 97959; HLA-C*07:06; TYR; ENSG00000077498; TAA
LPSSADVEF

SEQ ID NO: 97960 - protein, 11 aa, Homo sapiens
  Table A; Target 97960; HLA-B*35:01; TYR; ENSG00000077498; TAA
LPSSADVEFCL

SEQ ID NO: 97961 - protein, 11 aa, Homo sapiens
  Table A; Target 97961; HLA-B*35:03; TYR; ENSG00000077498; TAA
LPSSADVEFCL

SEQ ID NO: 97962 - protein, 9 aa, Homo sapiens
  Table A; Target 97962; HLA-A*02:04; TYR; ENSG00000077498; TAA
LPWHRLFLL

SEQ ID NO: 97963 - protein, 9 aa, Homo sapiens
  Table A; Target 97963; HLA-B*27:05; TYR; ENSG00000077498; TAA
LQDSDPDSF

SEQ ID NO: 97964 - protein, 9 aa, Homo sapiens
  Table A; Target 97964; HLA-B*38:01; TYR; ENSG00000077498; TAA
LQDSDPDSF

SEQ ID NO: 97965 - protein, 9 aa, Homo sapiens
  Table A; Target 97965; HLA-B*39:01; TYR; ENSG00000077498; TAA
LQDSDPDSF

SEQ ID NO: 97966 - protein, 9 aa, Homo sapiens
  Table A; Target 97966; HLA-B*55:01; TYR; ENSG00000077498; TAA
LQDSDPDSF

SEQ ID NO: 97967 - protein, 9 aa, Homo sapiens
  Table A; Target 97967; HLA-C*04:01; TYR; ENSG00000077498; TAA
LQDSDPDSF

SEQ ID NO: 97968 - protein, 9 aa, Homo sapiens
  Table A; Target 97968; HLA-C*05:01; TYR; ENSG00000077498; TAA
LQDSDPDSF

SEQ ID NO: 97969 - protein, 9 aa, Homo sapiens
  Table A; Target 97969; HLA-C*07:04; TYR; ENSG00000077498; TAA
LQDSDPDSF

SEQ ID NO: 97970 - protein, 9 aa, Homo sapiens
  Table A; Target 97970; HLA-B*27:05; TYR; ENSG00000077498; TAA
LRWEQEIQK

SEQ ID NO: 97971 - protein, 9 aa, Homo sapiens
  Table A; Target 97971; HLA-B*57:01; TYR; ENSG00000077498; TAA
LSAPEKDKF

SEQ ID NO: 97972 - protein, 9 aa, Homo sapiens
  Table A; Target 97972; HLA-B*58:01; TYR; ENSG00000077498; TAA
LSAPEKDKF

SEQ ID NO: 97973 - protein, 9 aa, Homo sapiens
  Table A; Target 97973; HLA-C*16:01; TYR; ENSG00000077498; TAA
LSAPEKDKF

SEQ ID NO: 97974 - protein, 10 aa, Homo sapiens
  Table A; Target 97974; HLA-B*57:01; TYR; ENSG00000077498; TAA
LSAPEKDKFF

SEQ ID NO: 97975 - protein, 10 aa, Homo sapiens
  Table A; Target 97975; HLA-A*30:02; TYR; ENSG00000077498; TAA
LSNAPLGPQF

SEQ ID NO: 97976 - protein, 10 aa, Homo sapiens
  Table A; Target 97976; HLA-A*32:01; TYR; ENSG00000077498; TAA
LSNAPLGPQF

SEQ ID NO: 97977 - protein, 10 aa, Homo sapiens
  Table A; Target 97977; HLA-B*57:01; TYR; ENSG00000077498; TAA
LSNAPLGPQF

SEQ ID NO: 97978 - protein, 10 aa, Homo sapiens
  Table A; Target 97978; HLA-B*58:01; TYR; ENSG00000077498; TAA
LSNAPLGPQF

SEQ ID NO: 97979 - protein, 10 aa, Homo sapiens
  Table A; Target 97979; HLA-C*16:01; TYR; ENSG00000077498; TAA
LSNAPLGPQF

SEQ ID NO: 97980 - protein, 10 aa, Homo sapiens
  Table A; Target 97980; HLA-A*24:02; TYR; ENSG00000077498; TAA
LSPASFFSSW

SEQ ID NO: 97981 - protein, 10 aa, Homo sapiens
  Table A; Target 97981; HLA-A*25:01; TYR; ENSG00000077498; TAA
LSPASFFSSW

SEQ ID NO: 97982 - protein, 10 aa, Homo sapiens
  Table A; Target 97982; HLA-B*57:01; TYR; ENSG00000077498; TAA
LSPASFFSSW

SEQ ID NO: 97983 - protein, 9 aa, Homo sapiens
  Table A; Target 97983; HLA-A*01:01; TYR; ENSG00000077498; TAA
LTALLAGLV

SEQ ID NO: 97984 - protein, 11 aa, Homo sapiens
  Table A; Target 97984; HLA-A*68:02; TYR; ENSG00000077498; TAA
LTALLAGLVSL

SEQ ID NO: 97985 - protein, 8 aa, Homo sapiens
  Table A; Target 97985; HLA-B*08:01; TYR; ENSG00000077498; TAA
LTLAKHTI

SEQ ID NO: 97986 - protein, 9 aa, Homo sapiens
  Table A; Target 97986; HLA-B*39:01; TYR; ENSG00000077498; TAA
LTQYESGSM

SEQ ID NO: 97987 - protein, 9 aa, Homo sapiens
  Table A; Target 97987; HLA-C*03:03; TYR; ENSG00000077498; TAA
LTQYESGSM

SEQ ID NO: 97988 - protein, 9 aa, Homo sapiens
  Table A; Target 97988; HLA-C*03:04; TYR; ENSG00000077498; TAA
LTQYESGSM

SEQ ID NO: 97989 - protein, 9 aa, Homo sapiens
  Table A; Target 97989; HLA-C*04:01; TYR; ENSG00000077498; TAA
LTQYESGSM

SEQ ID NO: 97990 - protein, 9 aa, Homo sapiens
  Table A; Target 97990; HLA-C*06:02; TYR; ENSG00000077498; TAA
LTQYESGSM

SEQ ID NO: 97991 - protein, 9 aa, Homo sapiens
  Table A; Target 97991; HLA-C*07:01; TYR; ENSG00000077498; TAA
LTQYESGSM

SEQ ID NO: 97992 - protein, 9 aa, Homo sapiens
  Table A; Target 97992; HLA-C*07:04; TYR; ENSG00000077498; TAA
LTQYESGSM

SEQ ID NO: 97993 - protein, 9 aa, Homo sapiens
  Table A; Target 97993; HLA-C*14:02; TYR; ENSG00000077498; TAA
LTQYESGSM

SEQ ID NO: 97994 - protein, 11 aa, Homo sapiens
  Table A; Target 97994; HLA-A*01:01; TYR; ENSG00000077498; TAA
LTQYESGSMDK

SEQ ID NO: 97995 - protein, 11 aa, Homo sapiens
  Table A; Target 97995; HLA-A*03:02; TYR; ENSG00000077498; TAA
LTQYESGSMDK

SEQ ID NO: 97996 - protein, 11 aa, Homo sapiens
  Table A; Target 97996; HLA-A*11:01; TYR; ENSG00000077498; TAA
LTQYESGSMDK

SEQ ID NO: 97997 - protein, 11 aa, Homo sapiens
  Table A; Target 97997; HLA-B*27:02; TYR; ENSG00000077498; TAA
LTQYESGSMDK

SEQ ID NO: 97998 - protein, 11 aa, Homo sapiens
  Table A; Target 97998; HLA-C*06:02; TYR; ENSG00000077498; TAA
LTQYESGSMDK

SEQ ID NO: 97999 - protein, 11 aa, Homo sapiens
  Table A; Target 97999; HLA-C*07:01; TYR; ENSG00000077498; TAA
LTQYESGSMDK

SEQ ID NO: 98000 - protein, 9 aa, Homo sapiens
  Table A; Target 98000; HLA-A*02:04; TYR; ENSG00000077498; TAA
LVRRNIFDL

SEQ ID NO: 98001 - protein, 11 aa, Homo sapiens
  Table A; Target 98001; HLA-B*44:02; TYR; ENSG00000077498; TAA
MDALLGGSEIW

SEQ ID NO: 98002 - protein, 11 aa, Homo sapiens
  Table A; Target 98002; HLA-B*44:03; TYR; ENSG00000077498; TAA
MDALLGGSEIW

SEQ ID NO: 98003 - protein, 11 aa, Homo sapiens
  Table A; Target 98003; HLA-B*57:01; TYR; ENSG00000077498; TAA
MDALLGGSEIW

SEQ ID NO: 98004 - protein, 9 aa, Homo sapiens
  Table A; Target 98004; HLA-A*30:01; TYR; ENSG00000077498; TAA
MDKAANFSF

SEQ ID NO: 98005 - protein, 9 aa, Homo sapiens
  Table A; Target 98005; HLA-B*15:03; TYR; ENSG00000077498; TAA
MDKAANFSF

SEQ ID NO: 98006 - protein, 9 aa, Homo sapiens
  Table A; Target 98006; HLA-B*18:01; TYR; ENSG00000077498; TAA
MDKAANFSF

SEQ ID NO: 98007 - protein, 9 aa, Homo sapiens
  Table A; Target 98007; HLA-B*37:01; TYR; ENSG00000077498; TAA
MDKAANFSF

SEQ ID NO: 98008 - protein, 9 aa, Homo sapiens
  Table A; Target 98008; HLA-B*40:02; TYR; ENSG00000077498; TAA
MDKAANFSF

SEQ ID NO: 98009 - protein, 9 aa, Homo sapiens
  Table A; Target 98009; HLA-B*44:02; TYR; ENSG00000077498; TAA
MDKAANFSF

SEQ ID NO: 98010 - protein, 9 aa, Homo sapiens
  Table A; Target 98010; HLA-B*57:01; TYR; ENSG00000077498; TAA
MDKAANFSF

SEQ ID NO: 98011 - protein, 9 aa, Homo sapiens
  Table A; Target 98011; HLA-C*04:01; TYR; ENSG00000077498; TAA
MDKAANFSF

SEQ ID NO: 98012 - protein, 9 aa, Homo sapiens
  Table A; Target 98012; HLA-C*07:01; TYR; ENSG00000077498; TAA
MDKAANFSF

SEQ ID NO: 98013 - protein, 9 aa, Homo sapiens
  Table A; Target 98013; HLA-C*07:04; TYR; ENSG00000077498; TAA
MDKAANFSF

SEQ ID NO: 98014 - protein, 9 aa, Homo sapiens
  Table A; Target 98014; HLA-C*16:04; TYR; ENSG00000077498; TAA
MDKAANFSF

SEQ ID NO: 98015 - protein, 10 aa, Homo sapiens
  Table A; Target 98015; HLA-A*33:01; TYR; ENSG00000077498; TAA
MDKAANFSFR

SEQ ID NO: 98016 - protein, 9 aa, Homo sapiens
  Table A; Target 98016; HLA-A*02:07; TYR; ENSG00000077498; TAA
MEKEDYHSL

SEQ ID NO: 98017 - protein, 9 aa, Homo sapiens
  Table A; Target 98017; HLA-A*25:01; TYR; ENSG00000077498; TAA
MEKEDYHSL

SEQ ID NO: 98018 - protein, 9 aa, Homo sapiens
  Table A; Target 98018; HLA-A*30:01; TYR; ENSG00000077498; TAA
MEKEDYHSL

SEQ ID NO: 98019 - protein, 9 aa, Homo sapiens
  Table A; Target 98019; HLA-B*08:01; TYR; ENSG00000077498; TAA
MEKEDYHSL

SEQ ID NO: 98020 - protein, 9 aa, Homo sapiens
  Table A; Target 98020; HLA-B*18:01; TYR; ENSG00000077498; TAA
MEKEDYHSL

SEQ ID NO: 98021 - protein, 9 aa, Homo sapiens
  Table A; Target 98021; HLA-B*37:01; TYR; ENSG00000077498; TAA
MEKEDYHSL

SEQ ID NO: 98022 - protein, 9 aa, Homo sapiens
  Table A; Target 98022; HLA-B*38:01; TYR; ENSG00000077498; TAA
MEKEDYHSL

SEQ ID NO: 98023 - protein, 9 aa, Homo sapiens
  Table A; Target 98023; HLA-B*40:01; TYR; ENSG00000077498; TAA
MEKEDYHSL

SEQ ID NO: 98024 - protein, 9 aa, Homo sapiens
  Table A; Target 98024; HLA-B*40:02; TYR; ENSG00000077498; TAA
MEKEDYHSL

SEQ ID NO: 98025 - protein, 9 aa, Homo sapiens
  Table A; Target 98025; HLA-B*44:02; TYR; ENSG00000077498; TAA
MEKEDYHSL

SEQ ID NO: 98026 - protein, 9 aa, Homo sapiens
  Table A; Target 98026; HLA-B*44:03; TYR; ENSG00000077498; TAA
MEKEDYHSL

SEQ ID NO: 98027 - protein, 9 aa, Homo sapiens
  Table A; Target 98027; HLA-B*46:01; TYR; ENSG00000077498; TAA
MEKEDYHSL

SEQ ID NO: 98028 - protein, 9 aa, Homo sapiens
  Table A; Target 98028; HLA-B*49:01; TYR; ENSG00000077498; TAA
MEKEDYHSL

SEQ ID NO: 98029 - protein, 9 aa, Homo sapiens
  Table A; Target 98029; HLA-C*02:02; TYR; ENSG00000077498; TAA
MEKEDYHSL

SEQ ID NO: 98030 - protein, 9 aa, Homo sapiens
  Table A; Target 98030; HLA-C*16:02; TYR; ENSG00000077498; TAA
MEKEDYHSL

SEQ ID NO: 98031 - protein, 9 aa, Homo sapiens
  Table A; Target 98031; HLA-C*16:04; TYR; ENSG00000077498; TAA
MEKEDYHSL

SEQ ID NO: 98032 - protein, 10 aa, Homo sapiens
  Table A; Target 98032; HLA-B*18:01; TYR; ENSG00000077498; TAA
MEKEDYHSLY

SEQ ID NO: 98033 - protein, 10 aa, Homo sapiens
  Table A; Target 98033; HLA-B*44:02; TYR; ENSG00000077498; TAA
MEKEDYHSLY

SEQ ID NO: 98034 - protein, 10 aa, Homo sapiens
  Table A; Target 98034; HLA-B*44:03; TYR; ENSG00000077498; TAA
MEKEDYHSLY

SEQ ID NO: 98035 - protein, 10 aa, Homo sapiens
  Table A; Target 98035; HLA-C*16:04; TYR; ENSG00000077498; TAA
MEKEDYHSLY

SEQ ID NO: 98036 - protein, 11 aa, Homo sapiens
  Table A; Target 98036; HLA-A*24:02; TYR; ENSG00000077498; TAA
MFNDINIYDLF

SEQ ID NO: 98037 - protein, 8 aa, Homo sapiens
  Table A; Target 98037; HLA-C*07:01; TYR; ENSG00000077498; TAA
MGGQHPTN

SEQ ID NO: 98038 - protein, 8 aa, Homo sapiens
  Table A; Target 98038; HLA-C*07:01; TYR; ENSG00000077498; TAA
MHNALHIY

SEQ ID NO: 98039 - protein, 9 aa, Homo sapiens
  Table A; Target 98039; HLA-A*31:01; TYR; ENSG00000077498; TAA
MHNALHIYM

SEQ ID NO: 98040 - protein, 9 aa, Homo sapiens
  Table A; Target 98040; HLA-B*38:01; TYR; ENSG00000077498; TAA
MHNALHIYM

SEQ ID NO: 98041 - protein, 9 aa, Homo sapiens
  Table A; Target 98041; HLA-C*07:01; TYR; ENSG00000077498; TAA
MHNALHIYM

SEQ ID NO: 98042 - protein, 9 aa, Homo sapiens
  Table A; Target 98042; HLA-C*07:04; TYR; ENSG00000077498; TAA
MHNALHIYM

SEQ ID NO: 98043 - protein, 9 aa, Homo sapiens
  Table A; Target 98043; HLA-B*54:01; TYR; ENSG00000077498; TAA
MHYYVSMDA

SEQ ID NO: 98044 - protein, 9 aa, Homo sapiens
  Table A; Target 98044; HLA-B*15:03; TYR; ENSG00000077498; TAA
MKNGSTPMF

SEQ ID NO: 98045 - protein, 9 aa, Homo sapiens
  Table A; Target 98045; HLA-B*38:01; TYR; ENSG00000077498; TAA
MKNGSTPMF

SEQ ID NO: 98046 - protein, 9 aa, Homo sapiens
  Table A; Target 98046; HLA-C*04:01; TYR; ENSG00000077498; TAA
MKNGSTPMF

SEQ ID NO: 98047 - protein, 10 aa, Homo sapiens
  Table A; Target 98047; HLA-C*07:01; TYR; ENSG00000077498; TAA
MKNGSTPMFN

SEQ ID NO: 98048 - protein, 9 aa, Homo sapiens
  Table A; Target 98048; HLA-A*02:04; TYR; ENSG00000077498; TAA
MLLAVLYCL

SEQ ID NO: 98049 - protein, 8 aa, Homo sapiens
  Table A; Target 98049; HLA-B*51:01; TYR; ENSG00000077498; TAA
MNGTMSQV

SEQ ID NO: 98050 - protein, 8 aa, Homo sapiens
  Table A; Target 98050; HLA-C*04:01; TYR; ENSG00000077498; TAA
MNGTMSQV

SEQ ID NO: 98051 - protein, 8 aa, Homo sapiens
  Table A; Target 98051; HLA-C*06:02; TYR; ENSG00000077498; TAA
MNGTMSQV

SEQ ID NO: 98052 - protein, 8 aa, Homo sapiens
  Table A; Target 98052; HLA-C*07:01; TYR; ENSG00000077498; TAA
MNGTMSQV

SEQ ID NO: 98053 - protein, 8 aa, Homo sapiens
  Table A; Target 98053; HLA-C*07:02; TYR; ENSG00000077498; TAA
MNGTMSQV

SEQ ID NO: 98054 - protein, 8 aa, Homo sapiens
  Table A; Target 98054; HLA-C*07:04; TYR; ENSG00000077498; TAA
MNGTMSQV

SEQ ID NO: 98055 - protein, 8 aa, Homo sapiens
  Table A; Target 98055; HLA-C*12:03; TYR; ENSG00000077498; TAA
MNGTMSQV

SEQ ID NO: 98056 - protein, 8 aa, Homo sapiens
  Table A; Target 98056; HLA-B*54:01; TYR; ENSG00000077498; TAA
MVGAVLTA

SEQ ID NO: 98057 - protein, 8 aa, Homo sapiens
  Table A; Target 98057; HLA-B*56:01; TYR; ENSG00000077498; TAA
MVGAVLTA

SEQ ID NO: 98058 - protein, 9 aa, Homo sapiens
  Table A; Target 98058; HLA-A*02:03; TYR; ENSG00000077498; TAA
MVGAVLTAL

SEQ ID NO: 98059 - protein, 9 aa, Homo sapiens
  Table A; Target 98059; HLA-A*02:04; TYR; ENSG00000077498; TAA
MVGAVLTAL

SEQ ID NO: 98060 - protein, 9 aa, Homo sapiens
  Table A; Target 98060; HLA-A*02:07; TYR; ENSG00000077498; TAA
MVGAVLTAL

SEQ ID NO: 98061 - protein, 9 aa, Homo sapiens
  Table A; Target 98061; HLA-A*03:01; TYR; ENSG00000077498; TAA
MVGAVLTAL

SEQ ID NO: 98062 - protein, 9 aa, Homo sapiens
  Table A; Target 98062; HLA-A*03:02; TYR; ENSG00000077498; TAA
MVGAVLTAL

SEQ ID NO: 98063 - protein, 9 aa, Homo sapiens
  Table A; Target 98063; HLA-A*11:01; TYR; ENSG00000077498; TAA
MVGAVLTAL

SEQ ID NO: 98064 - protein, 9 aa, Homo sapiens
  Table A; Target 98064; HLA-A*23:01; TYR; ENSG00000077498; TAA
MVGAVLTAL

SEQ ID NO: 98065 - protein, 9 aa, Homo sapiens
  Table A; Target 98065; HLA-A*24:02; TYR; ENSG00000077498; TAA
MVGAVLTAL

SEQ ID NO: 98066 - protein, 9 aa, Homo sapiens
  Table A; Target 98066; HLA-A*25:01; TYR; ENSG00000077498; TAA
MVGAVLTAL

SEQ ID NO: 98067 - protein, 9 aa, Homo sapiens
  Table A; Target 98067; HLA-A*26:01; TYR; ENSG00000077498; TAA
MVGAVLTAL

SEQ ID NO: 98068 - protein, 9 aa, Homo sapiens
  Table A; Target 98068; HLA-A*30:01; TYR; ENSG00000077498; TAA
MVGAVLTAL

SEQ ID NO: 98069 - protein, 9 aa, Homo sapiens
  Table A; Target 98069; HLA-A*31:01; TYR; ENSG00000077498; TAA
MVGAVLTAL

SEQ ID NO: 98070 - protein, 9 aa, Homo sapiens
  Table A; Target 98070; HLA-A*32:01; TYR; ENSG00000077498; TAA
MVGAVLTAL

SEQ ID NO: 98071 - protein, 9 aa, Homo sapiens
  Table A; Target 98071; HLA-A*33:03; TYR; ENSG00000077498; TAA
MVGAVLTAL

SEQ ID NO: 98072 - protein, 9 aa, Homo sapiens
  Table A; Target 98072; HLA-A*68:01; TYR; ENSG00000077498; TAA
MVGAVLTAL

SEQ ID NO: 98073 - protein, 9 aa, Homo sapiens
  Table A; Target 98073; HLA-A*68:02; TYR; ENSG00000077498; TAA
MVGAVLTAL

SEQ ID NO: 98074 - protein, 9 aa, Homo sapiens
  Table A; Target 98074; HLA-B*07:02; TYR; ENSG00000077498; TAA
MVGAVLTAL

SEQ ID NO: 98075 - protein, 9 aa, Homo sapiens
  Table A; Target 98075; HLA-B*08:01; TYR; ENSG00000077498; TAA
MVGAVLTAL

SEQ ID NO: 98076 - protein, 9 aa, Homo sapiens
  Table A; Target 98076; HLA-B*15:01; TYR; ENSG00000077498; TAA
MVGAVLTAL

SEQ ID NO: 98077 - protein, 9 aa, Homo sapiens
  Table A; Target 98077; HLA-B*18:01; TYR; ENSG00000077498; TAA
MVGAVLTAL

SEQ ID NO: 98078 - protein, 9 aa, Homo sapiens
  Table A; Target 98078; HLA-B*27:05; TYR; ENSG00000077498; TAA
MVGAVLTAL

SEQ ID NO: 98079 - protein, 9 aa, Homo sapiens
  Table A; Target 98079; HLA-B*35:01; TYR; ENSG00000077498; TAA
MVGAVLTAL

SEQ ID NO: 98080 - protein, 9 aa, Homo sapiens
  Table A; Target 98080; HLA-B*35:03; TYR; ENSG00000077498; TAA
MVGAVLTAL

SEQ ID NO: 98081 - protein, 9 aa, Homo sapiens
  Table A; Target 98081; HLA-B*38:01; TYR; ENSG00000077498; TAA
MVGAVLTAL

SEQ ID NO: 98082 - protein, 9 aa, Homo sapiens
  Table A; Target 98082; HLA-B*39:01; TYR; ENSG00000077498; TAA
MVGAVLTAL

SEQ ID NO: 98083 - protein, 9 aa, Homo sapiens
  Table A; Target 98083; HLA-B*40:01; TYR; ENSG00000077498; TAA
MVGAVLTAL

SEQ ID NO: 98084 - protein, 9 aa, Homo sapiens
  Table A; Target 98084; HLA-B*40:02; TYR; ENSG00000077498; TAA
MVGAVLTAL

SEQ ID NO: 98085 - protein, 9 aa, Homo sapiens
  Table A; Target 98085; HLA-B*46:01; TYR; ENSG00000077498; TAA
MVGAVLTAL

SEQ ID NO: 98086 - protein, 9 aa, Homo sapiens
  Table A; Target 98086; HLA-B*51:01; TYR; ENSG00000077498; TAA
MVGAVLTAL

SEQ ID NO: 98087 - protein, 9 aa, Homo sapiens
  Table A; Target 98087; HLA-B*54:01; TYR; ENSG00000077498; TAA
MVGAVLTAL

SEQ ID NO: 98088 - protein, 9 aa, Homo sapiens
  Table A; Target 98088; HLA-B*55:01; TYR; ENSG00000077498; TAA
MVGAVLTAL

SEQ ID NO: 98089 - protein, 9 aa, Homo sapiens
  Table A; Target 98089; HLA-B*56:01; TYR; ENSG00000077498; TAA
MVGAVLTAL

SEQ ID NO: 98090 - protein, 9 aa, Homo sapiens
  Table A; Target 98090; HLA-B*58:01; TYR; ENSG00000077498; TAA
MVGAVLTAL

SEQ ID NO: 98091 - protein, 9 aa, Homo sapiens
  Table A; Target 98091; HLA-C*01:02; TYR; ENSG00000077498; TAA
MVGAVLTAL

SEQ ID NO: 98092 - protein, 9 aa, Homo sapiens
  Table A; Target 98092; HLA-C*02:02; TYR; ENSG00000077498; TAA
MVGAVLTAL

SEQ ID NO: 98093 - protein, 9 aa, Homo sapiens
  Table A; Target 98093; HLA-C*03:03; TYR; ENSG00000077498; TAA
MVGAVLTAL

SEQ ID NO: 98094 - protein, 9 aa, Homo sapiens
  Table A; Target 98094; HLA-C*03:04; TYR; ENSG00000077498; TAA
MVGAVLTAL

SEQ ID NO: 98095 - protein, 9 aa, Homo sapiens
  Table A; Target 98095; HLA-C*04:01; TYR; ENSG00000077498; TAA
MVGAVLTAL

SEQ ID NO: 98096 - protein, 9 aa, Homo sapiens
  Table A; Target 98096; HLA-C*05:01; TYR; ENSG00000077498; TAA
MVGAVLTAL

SEQ ID NO: 98097 - protein, 9 aa, Homo sapiens
  Table A; Target 98097; HLA-C*06:02; TYR; ENSG00000077498; TAA
MVGAVLTAL

SEQ ID NO: 98098 - protein, 9 aa, Homo sapiens
  Table A; Target 98098; HLA-C*07:01; TYR; ENSG00000077498; TAA
MVGAVLTAL

SEQ ID NO: 98099 - protein, 9 aa, Homo sapiens
  Table A; Target 98099; HLA-C*07:02; TYR; ENSG00000077498; TAA
MVGAVLTAL

SEQ ID NO: 98100 - protein, 9 aa, Homo sapiens
  Table A; Target 98100; HLA-C*07:04; TYR; ENSG00000077498; TAA
MVGAVLTAL

SEQ ID NO: 98101 - protein, 9 aa, Homo sapiens
  Table A; Target 98101; HLA-C*07:06; TYR; ENSG00000077498; TAA
MVGAVLTAL

SEQ ID NO: 98102 - protein, 9 aa, Homo sapiens
  Table A; Target 98102; HLA-C*14:02; TYR; ENSG00000077498; TAA
MVGAVLTAL

SEQ ID NO: 98103 - protein, 10 aa, Homo sapiens
  Table A; Target 98103; HLA-A*68:02; TYR; ENSG00000077498; TAA
MVGAVLTALL

SEQ ID NO: 98104 - protein, 10 aa, Homo sapiens
  Table A; Target 98104; HLA-B*07:02; TYR; ENSG00000077498; TAA
MVGAVLTALL

SEQ ID NO: 98105 - protein, 10 aa, Homo sapiens
  Table A; Target 98105; HLA-C*07:01; TYR; ENSG00000077498; TAA
MVGAVLTALL

SEQ ID NO: 98106 - protein, 10 aa, Homo sapiens
  Table A; Target 98106; HLA-C*07:02; TYR; ENSG00000077498; TAA
MVGAVLTALL

SEQ ID NO: 98107 - protein, 8 aa, Homo sapiens
  Table A; Target 98107; HLA-A*29:02; TYR; ENSG00000077498; TAA
MVPFIPLY

SEQ ID NO: 98108 - protein, 8 aa, Homo sapiens
  Table A; Target 98108; HLA-B*51:01; TYR; ENSG00000077498; TAA
MVPFIPLY

SEQ ID NO: 98109 - protein, 8 aa, Homo sapiens
  Table A; Target 98109; HLA-C*07:01; TYR; ENSG00000077498; TAA
MVPFIPLY

SEQ ID NO: 98110 - protein, 9 aa, Homo sapiens
  Table A; Target 98110; HLA-A*02:07; TYR; ENSG00000077498; TAA
MVPFIPLYR

SEQ ID NO: 98111 - protein, 9 aa, Homo sapiens
  Table A; Target 98111; HLA-A*29:02; TYR; ENSG00000077498; TAA
MVPFIPLYR

SEQ ID NO: 98112 - protein, 9 aa, Homo sapiens
  Table A; Target 98112; HLA-A*31:01; TYR; ENSG00000077498; TAA
MVPFIPLYR

SEQ ID NO: 98113 - protein, 9 aa, Homo sapiens
  Table A; Target 98113; HLA-A*33:03; TYR; ENSG00000077498; TAA
MVPFIPLYR

SEQ ID NO: 98114 - protein, 9 aa, Homo sapiens
  Table A; Target 98114; HLA-A*68:02; TYR; ENSG00000077498; TAA
MVPFIPLYR

SEQ ID NO: 98115 - protein, 9 aa, Homo sapiens
  Table A; Target 98115; HLA-B*54:01; TYR; ENSG00000077498; TAA
MVPFIPLYR

SEQ ID NO: 98116 - protein, 8 aa, Homo sapiens
  Table A; Target 98116; HLA-A*33:01; TYR; ENSG00000077498; TAA
NAPIGHNR

SEQ ID NO: 98117 - protein, 8 aa, Homo sapiens
  Table A; Target 98117; HLA-B*51:01; TYR; ENSG00000077498; TAA
NAPIGHNR

SEQ ID NO: 98118 - protein, 8 aa, Homo sapiens
  Table A; Target 98118; HLA-C*01:02; TYR; ENSG00000077498; TAA
NAPIGHNR

SEQ ID NO: 98119 - protein, 8 aa, Homo sapiens
  Table A; Target 98119; HLA-B*51:01; TYR; ENSG00000077498; TAA
NAPLGPQF

SEQ ID NO: 98120 - protein, 8 aa, Homo sapiens
  Table A; Target 98120; HLA-C*01:02; TYR; ENSG00000077498; TAA
NAPLGPQF

SEQ ID NO: 98121 - protein, 8 aa, Homo sapiens
  Table A; Target 98121; HLA-C*04:01; TYR; ENSG00000077498; TAA
NAPLGPQF

SEQ ID NO: 98122 - protein, 8 aa, Homo sapiens
  Table A; Target 98122; HLA-C*05:01; TYR; ENSG00000077498; TAA
NAPLGPQF

SEQ ID NO: 98123 - protein, 8 aa, Homo sapiens
  Table A; Target 98123; HLA-C*16:01; TYR; ENSG00000077498; TAA
NAPLGPQF

SEQ ID NO: 98124 - protein, 10 aa, Homo sapiens
  Table A; Target 98124; HLA-A*02:07; TYR; ENSG00000077498; TAA
NAPLGPQFPF

SEQ ID NO: 98125 - protein, 10 aa, Homo sapiens
  Table A; Target 98125; HLA-A*24:02; TYR; ENSG00000077498; TAA
NAPLGPQFPF

SEQ ID NO: 98126 - protein, 10 aa, Homo sapiens
  Table A; Target 98126; HLA-B*35:01; TYR; ENSG00000077498; TAA
NAPLGPQFPF

SEQ ID NO: 98127 - protein, 10 aa, Homo sapiens
  Table A; Target 98127; HLA-C*07:01; TYR; ENSG00000077498; TAA
NAPLGPQFPF

SEQ ID NO: 98128 - protein, 10 aa, Homo sapiens
  Table A; Target 98128; HLA-C*07:02; TYR; ENSG00000077498; TAA
NAPLGPQFPF

SEQ ID NO: 98129 - protein, 8 aa, Homo sapiens
  Table A; Target 98129; HLA-A*30:01; TYR; ENSG00000077498; TAA
NDINIYDL

SEQ ID NO: 98130 - protein, 8 aa, Homo sapiens
  Table A; Target 98130; HLA-B*18:01; TYR; ENSG00000077498; TAA
NDINIYDL

SEQ ID NO: 98131 - protein, 8 aa, Homo sapiens
  Table A; Target 98131; HLA-B*37:01; TYR; ENSG00000077498; TAA
NDINIYDL

SEQ ID NO: 98132 - protein, 9 aa, Homo sapiens
  Table A; Target 98132; HLA-B*44:02; TYR; ENSG00000077498; TAA
NDINIYDLF

SEQ ID NO: 98133 - protein, 9 aa, Homo sapiens
  Table A; Target 98133; HLA-B*44:03; TYR; ENSG00000077498; TAA
NDINIYDLF

SEQ ID NO: 98134 - protein, 9 aa, Homo sapiens
  Table A; Target 98134; HLA-A*03:02; TYR; ENSG00000077498; TAA
NGDFFISSK

SEQ ID NO: 98135 - protein, 9 aa, Homo sapiens
  Table A; Target 98135; HLA-A*11:01; TYR; ENSG00000077498; TAA
NGDFFISSK

SEQ ID NO: 98136 - protein, 9 aa, Homo sapiens
  Table A; Target 98136; HLA-A*68:01; TYR; ENSG00000077498; TAA
NGTPEGPLR

SEQ ID NO: 98137 - protein, 9 aa, Homo sapiens
  Table A; Target 98137; HLA-C*07:06; TYR; ENSG00000077498; TAA
NGTPEGPLR

SEQ ID NO: 98138 - protein, 10 aa, Homo sapiens
  Table A; Target 98138; HLA-A*03:01; TYR; ENSG00000077498; TAA
NIFDLSAPEK

SEQ ID NO: 98139 - protein, 10 aa, Homo sapiens
  Table A; Target 98139; HLA-A*03:02; TYR; ENSG00000077498; TAA
NIFDLSAPEK

SEQ ID NO: 98140 - protein, 10 aa, Homo sapiens
  Table A; Target 98140; HLA-A*11:01; TYR; ENSG00000077498; TAA
NIFDLSAPEK

SEQ ID NO: 98141 - protein, 10 aa, Homo sapiens
  Table A; Target 98141; HLA-A*26:01; TYR; ENSG00000077498; TAA
NIFDLSAPEK

SEQ ID NO: 98142 - protein, 10 aa, Homo sapiens
  Table A; Target 98142; HLA-A*68:01; TYR; ENSG00000077498; TAA
NIFDLSAPEK

SEQ ID NO: 98143 - protein, 10 aa, Homo sapiens
  Table A; Target 98143; HLA-A*68:02; TYR; ENSG00000077498; TAA
NIFDLSAPEK

SEQ ID NO: 98144 - protein, 10 aa, Homo sapiens
  Table A; Target 98144; HLA-B*27:02; TYR; ENSG00000077498; TAA
NIFDLSAPEK

SEQ ID NO: 98145 - protein, 10 aa, Homo sapiens
  Table A; Target 98145; HLA-B*27:05; TYR; ENSG00000077498; TAA
NIFDLSAPEK

SEQ ID NO: 98146 - protein, 10 aa, Homo sapiens
  Table A; Target 98146; HLA-C*01:02; TYR; ENSG00000077498; TAA
NIFDLSAPEK

SEQ ID NO: 98147 - protein, 10 aa, Homo sapiens
  Table A; Target 98147; HLA-C*07:06; TYR; ENSG00000077498; TAA
NIFDLSAPEK

SEQ ID NO: 98148 - protein, 9 aa, Homo sapiens
  Table A; Target 98148; HLA-A*29:02; TYR; ENSG00000077498; TAA
NLLSPASFF

SEQ ID NO: 98149 - protein, 10 aa, Homo sapiens
  Table A; Target 98149; HLA-A*02:01; TYR; ENSG00000077498; TAA
NTLEGFASPL

SEQ ID NO: 98150 - protein, 10 aa, Homo sapiens
  Table A; Target 98150; HLA-A*33:01; TYR; ENSG00000077498; TAA
NTLEGFASPL

SEQ ID NO: 98151 - protein, 10 aa, Homo sapiens
  Table A; Target 98151; HLA-A*68:02; TYR; ENSG00000077498; TAA
NTLEGFASPL

SEQ ID NO: 98152 - protein, 10 aa, Homo sapiens
  Table A; Target 98152; HLA-B*07:02; TYR; ENSG00000077498; TAA
NTLEGFASPL

SEQ ID NO: 98153 - protein, 10 aa, Homo sapiens
  Table A; Target 98153; HLA-C*01:02; TYR; ENSG00000077498; TAA
NTLEGFASPL

SEQ ID NO: 98154 - protein, 10 aa, Homo sapiens
  Table A; Target 98154; HLA-C*06:02; TYR; ENSG00000077498; TAA
NTLEGFASPL

SEQ ID NO: 98155 - protein, 10 aa, Homo sapiens
  Table A; Target 98155; HLA-C*07:01; TYR; ENSG00000077498; TAA
NTLEGFASPL

SEQ ID NO: 98156 - protein, 10 aa, Homo sapiens
  Table A; Target 98156; HLA-C*07:02; TYR; ENSG00000077498; TAA
NTLEGFASPL

SEQ ID NO: 98157 - protein, 10 aa, Homo sapiens
  Table A; Target 98157; HLA-C*14:02; TYR; ENSG00000077498; TAA
NTLEGFASPL

SEQ ID NO: 98158 - protein, 9 aa, Homo sapiens
  Table A; Target 98158; HLA-B*27:02; TYR; ENSG00000077498; TAA
PDSFQDYIK

SEQ ID NO: 98159 - protein, 9 aa, Homo sapiens
  Table A; Target 98159; HLA-B*07:02; TYR; ENSG00000077498; TAA
PEANAPIGH

SEQ ID NO: 98160 - protein, 11 aa, Homo sapiens
  Table A; Target 98160; HLA-A*68:01; TYR; ENSG00000077498; TAA
PEANAPIGHNR

SEQ ID NO: 98161 - protein, 8 aa, Homo sapiens
  Table A; Target 98161; HLA-C*04:01; TYR; ENSG00000077498; TAA
PIGTYGQM

SEQ ID NO: 98162 - protein, 8 aa, Homo sapiens
  Table A; Target 98162; HLA-C*07:01; TYR; ENSG00000077498; TAA
PLGPQFPF

SEQ ID NO: 98163 - protein, 8 aa, Homo sapiens
  Table A; Target 98163; HLA-C*07:02; TYR; ENSG00000077498; TAA
PLGPQFPF

SEQ ID NO: 98164 - protein, 11 aa, Homo sapiens
  Table A; Target 98164; HLA-B*27:02; TYR; ENSG00000077498; TAA
PRLPSSADVEF

SEQ ID NO: 98165 - protein, 11 aa, Homo sapiens
  Table A; Target 98165; HLA-C*06:02; TYR; ENSG00000077498; TAA
PRLPSSADVEF

SEQ ID NO: 98166 - protein, 11 aa, Homo sapiens
  Table A; Target 98166; HLA-C*07:01; TYR; ENSG00000077498; TAA
PRLPSSADVEF

SEQ ID NO: 98167 - protein, 8 aa, Homo sapiens
  Table A; Target 98167; HLA-B*57:01; TYR; ENSG00000077498; TAA
QASRIWSW

SEQ ID NO: 98168 - protein, 9 aa, Homo sapiens
  Table A; Target 98168; HLA-A*26:01; TYR; ENSG00000077498; TAA
QCSGNFMGF

SEQ ID NO: 98169 - protein, 8 aa, Homo sapiens
  Table A; Target 98169; HLA-B*37:01; TYR; ENSG00000077498; TAA
QDSDPDSF

SEQ ID NO: 98170 - protein, 11 aa, Homo sapiens
  Table A; Target 98170; HLA-A*30:02; TYR; ENSG00000077498; TAA
QDSDPDSFQDY

SEQ ID NO: 98171 - protein, 8 aa, Homo sapiens
  Table A; Target 98171; HLA-B*08:01; TYR; ENSG00000077498; TAA
QDYIKSYL

SEQ ID NO: 98172 - protein, 8 aa, Homo sapiens
  Table A; Target 98172; HLA-B*37:01; TYR; ENSG00000077498; TAA
QDYIKSYL

SEQ ID NO: 98173 - protein, 8 aa, Homo sapiens
  Table A; Target 98173; HLA-B*40:02; TYR; ENSG00000077498; TAA
QDYIKSYL

SEQ ID NO: 98174 - protein, 8 aa, Homo sapiens
  Table A; Target 98174; HLA-C*04:01; TYR; ENSG00000077498; TAA
QDYIKSYL

SEQ ID NO: 98175 - protein, 8 aa, Homo sapiens
  Table A; Target 98175; HLA-C*07:01; TYR; ENSG00000077498; TAA
QDYIKSYL

SEQ ID NO: 98176 - protein, 9 aa, Homo sapiens
  Table A; Target 98176; HLA-B*49:01; TYR; ENSG00000077498; TAA
QEVYPEANA

SEQ ID NO: 98177 - protein, 9 aa, Homo sapiens
  Table A; Target 98177; HLA-B*35:03; TYR; ENSG00000077498; TAA
QGSANDPIF

SEQ ID NO: 98178 - protein, 9 aa, Homo sapiens
  Table A; Target 98178; HLA-B*38:01; TYR; ENSG00000077498; TAA
QGSANDPIF

SEQ ID NO: 98179 - protein, 9 aa, Homo sapiens
  Table A; Target 98179; HLA-C*03:03; TYR; ENSG00000077498; TAA
QGSANDPIF

SEQ ID NO: 98180 - protein, 9 aa, Homo sapiens
  Table A; Target 98180; HLA-A*24:02; TYR; ENSG00000077498; TAA
QHPTNPNLL

SEQ ID NO: 98181 - protein, 9 aa, Homo sapiens
  Table A; Target 98181; HLA-B*38:01; TYR; ENSG00000077498; TAA
QHPTNPNLL

SEQ ID NO: 98182 - protein, 9 aa, Homo sapiens
  Table A; Target 98182; HLA-B*39:01; TYR; ENSG00000077498; TAA
QHPTNPNLL

SEQ ID NO: 98183 - protein, 9 aa, Homo sapiens
  Table A; Target 98183; HLA-C*07:01; TYR; ENSG00000077498; TAA
QHPTNPNLL

SEQ ID NO: 98184 - protein, 9 aa, Homo sapiens
  Table A; Target 98184; HLA-B*15:03; TYR; ENSG00000077498; TAA
QKLTGDENF

SEQ ID NO: 98185 - protein, 9 aa, Homo sapiens
  Table A; Target 98185; HLA-B*38:01; TYR; ENSG00000077498; TAA
QKLTGDENF

SEQ ID NO: 98186 - protein, 9 aa, Homo sapiens
  Table A; Target 98186; HLA-A*02:07; TYR; ENSG00000077498; TAA
QLPEEKQPL

SEQ ID NO: 98187 - protein, 9 aa, Homo sapiens
  Table A; Target 98187; HLA-B*08:01; TYR; ENSG00000077498; TAA
QLPEEKQPL

SEQ ID NO: 98188 - protein, 9 aa, Homo sapiens
  Table A; Target 98188; HLA-C*01:02; TYR; ENSG00000077498; TAA
QLPEEKQPL

SEQ ID NO: 98189 - protein, 10 aa, Homo sapiens
  Table A; Target 98189; HLA-A*02:01; TYR; ENSG00000077498; TAA
QLPEEKQPLL

SEQ ID NO: 98190 - protein, 10 aa, Homo sapiens
  Table A; Target 98190; HLA-A*02:03; TYR; ENSG00000077498; TAA
QLPEEKQPLL

SEQ ID NO: 98191 - protein, 10 aa, Homo sapiens
  Table A; Target 98191; HLA-A*02:04; TYR; ENSG00000077498; TAA
QLPEEKQPLL

SEQ ID NO: 98192 - protein, 10 aa, Homo sapiens
  Table A; Target 98192; HLA-A*02:07; TYR; ENSG00000077498; TAA
QLPEEKQPLL

SEQ ID NO: 98193 - protein, 10 aa, Homo sapiens
  Table A; Target 98193; HLA-A*24:02; TYR; ENSG00000077498; TAA
QLPEEKQPLL

SEQ ID NO: 98194 - protein, 11 aa, Homo sapiens
  Table A; Target 98194; HLA-A*02:01; TYR; ENSG00000077498; TAA
QLPEEKQPLLM

SEQ ID NO: 98195 - protein, 11 aa, Homo sapiens
  Table A; Target 98195; HLA-A*02:07; TYR; ENSG00000077498; TAA
QLPEEKQPLLM

SEQ ID NO: 98196 - protein, 9 aa, Homo sapiens
  Table A; Target 98196; HLA-A*32:01; TYR; ENSG00000077498; TAA
QMKNGSTPM

SEQ ID NO: 98197 - protein, 9 aa, Homo sapiens
  Table A; Target 98197; HLA-B*07:02; TYR; ENSG00000077498; TAA
QMKNGSTPM

SEQ ID NO: 98198 - protein, 9 aa, Homo sapiens
  Table A; Target 98198; HLA-B*08:01; TYR; ENSG00000077498; TAA
QMKNGSTPM

SEQ ID NO: 98199 - protein, 9 aa, Homo sapiens
  Table A; Target 98199; HLA-B*15:01; TYR; ENSG00000077498; TAA
QMKNGSTPM

SEQ ID NO: 98200 - protein, 9 aa, Homo sapiens
  Table A; Target 98200; HLA-B*15:03; TYR; ENSG00000077498; TAA
QMKNGSTPM

SEQ ID NO: 98201 - protein, 9 aa, Homo sapiens
  Table A; Target 98201; HLA-B*46:01; TYR; ENSG00000077498; TAA
QMKNGSTPM

SEQ ID NO: 98202 - protein, 9 aa, Homo sapiens
  Table A; Target 98202; HLA-C*01:02; TYR; ENSG00000077498; TAA
QMKNGSTPM

SEQ ID NO: 98203 - protein, 9 aa, Homo sapiens
  Table A; Target 98203; HLA-C*07:02; TYR; ENSG00000077498; TAA
QMKNGSTPM

SEQ ID NO: 98204 - protein, 9 aa, Homo sapiens
  Table A; Target 98204; HLA-C*07:04; TYR; ENSG00000077498; TAA
QMKNGSTPM

SEQ ID NO: 98205 - protein, 9 aa, Homo sapiens
  Table A; Target 98205; HLA-C*14:02; TYR; ENSG00000077498; TAA
QMKNGSTPM

SEQ ID NO: 98206 - protein, 9 aa, Homo sapiens
  Table A; Target 98206; HLA-C*16:01; TYR; ENSG00000077498; TAA
QMKNGSTPM

SEQ ID NO: 98207 - protein, 10 aa, Homo sapiens
  Table A; Target 98207; HLA-A*23:01; TYR; ENSG00000077498; TAA
QMKNGSTPMF

SEQ ID NO: 98208 - protein, 10 aa, Homo sapiens
  Table A; Target 98208; HLA-A*24:02; TYR; ENSG00000077498; TAA
QMKNGSTPMF

SEQ ID NO: 98209 - protein, 10 aa, Homo sapiens
  Table A; Target 98209; HLA-A*25:01; TYR; ENSG00000077498; TAA
QMKNGSTPMF

SEQ ID NO: 98210 - protein, 10 aa, Homo sapiens
  Table A; Target 98210; HLA-A*32:01; TYR; ENSG00000077498; TAA
QMKNGSTPMF

SEQ ID NO: 98211 - protein, 10 aa, Homo sapiens
  Table A; Target 98211; HLA-B*15:01; TYR; ENSG00000077498; TAA
QMKNGSTPMF

SEQ ID NO: 98212 - protein, 10 aa, Homo sapiens
  Table A; Target 98212; HLA-B*35:01; TYR; ENSG00000077498; TAA
QPLLMEKEDY

SEQ ID NO: 98213 - protein, 10 aa, Homo sapiens
  Table A; Target 98213; HLA-C*03:03; TYR; ENSG00000077498; TAA
QPLLMEKEDY

SEQ ID NO: 98214 - protein, 8 aa, Homo sapiens
  Table A; Target 98214; HLA-B*07:02; TYR; ENSG00000077498; TAA
QSSMHNAL

SEQ ID NO: 98215 - protein, 8 aa, Homo sapiens
  Table A; Target 98215; HLA-B*08:01; TYR; ENSG00000077498; TAA
QSSMHNAL

SEQ ID NO: 98216 - protein, 8 aa, Homo sapiens
  Table A; Target 98216; HLA-B*37:01; TYR; ENSG00000077498; TAA
QSSMHNAL

SEQ ID NO: 98217 - protein, 8 aa, Homo sapiens
  Table A; Target 98217; HLA-C*01:02; TYR; ENSG00000077498; TAA
QSSMHNAL

SEQ ID NO: 98218 - protein, 8 aa, Homo sapiens
  Table A; Target 98218; HLA-C*03:04; TYR; ENSG00000077498; TAA
QSSMHNAL

SEQ ID NO: 98219 - protein, 8 aa, Homo sapiens
  Table A; Target 98219; HLA-C*06:02; TYR; ENSG00000077498; TAA
QSSMHNAL

SEQ ID NO: 98220 - protein, 8 aa, Homo sapiens
  Table A; Target 98220; HLA-C*07:04; TYR; ENSG00000077498; TAA
QSSMHNAL

SEQ ID NO: 98221 - protein, 8 aa, Homo sapiens
  Table A; Target 98221; HLA-C*12:03; TYR; ENSG00000077498; TAA
QSSMHNAL

SEQ ID NO: 98222 - protein, 8 aa, Homo sapiens
  Table A; Target 98222; HLA-C*16:01; TYR; ENSG00000077498; TAA
QSSMHNAL

SEQ ID NO: 98223 - protein, 8 aa, Homo sapiens
  Table A; Target 98223; HLA-C*16:02; TYR; ENSG00000077498; TAA
QSSMHNAL

SEQ ID NO: 98224 - protein, 11 aa, Homo sapiens
  Table A; Target 98224; HLA-A*01:01; TYR; ENSG00000077498; TAA
QSSMHNALHIY

SEQ ID NO: 98225 - protein, 9 aa, Homo sapiens
  Table A; Target 98225; HLA-A*03:01; TYR; ENSG00000077498; TAA
QTSAGHFPR

SEQ ID NO: 98226 - protein, 9 aa, Homo sapiens
  Table A; Target 98226; HLA-A*03:02; TYR; ENSG00000077498; TAA
QTSAGHFPR

SEQ ID NO: 98227 - protein, 9 aa, Homo sapiens
  Table A; Target 98227; HLA-A*11:01; TYR; ENSG00000077498; TAA
QTSAGHFPR

SEQ ID NO: 98228 - protein, 9 aa, Homo sapiens
  Table A; Target 98228; HLA-A*29:02; TYR; ENSG00000077498; TAA
QTSAGHFPR

SEQ ID NO: 98229 - protein, 9 aa, Homo sapiens
  Table A; Target 98229; HLA-A*31:01; TYR; ENSG00000077498; TAA
QTSAGHFPR

SEQ ID NO: 98230 - protein, 9 aa, Homo sapiens
  Table A; Target 98230; HLA-A*33:01; TYR; ENSG00000077498; TAA
QTSAGHFPR

SEQ ID NO: 98231 - protein, 9 aa, Homo sapiens
  Table A; Target 98231; HLA-A*33:03; TYR; ENSG00000077498; TAA
QTSAGHFPR

SEQ ID NO: 98232 - protein, 9 aa, Homo sapiens
  Table A; Target 98232; HLA-A*68:01; TYR; ENSG00000077498; TAA
QTSAGHFPR

SEQ ID NO: 98233 - protein, 9 aa, Homo sapiens
  Table A; Target 98233; HLA-C*07:06; TYR; ENSG00000077498; TAA
QTSAGHFPR

SEQ ID NO: 98234 - protein, 9 aa, Homo sapiens
  Table A; Target 98234; HLA-C*01:02; TYR; ENSG00000077498; TAA
QYESGSMDK

SEQ ID NO: 98235 - protein, 9 aa, Homo sapiens
  Table A; Target 98235; HLA-C*07:01; TYR; ENSG00000077498; TAA
QYESGSMDK

SEQ ID NO: 98236 - protein, 9 aa, Homo sapiens
  Table A; Target 98236; HLA-A*30:01; TYR; ENSG00000077498; TAA
RDIDFAHEA

SEQ ID NO: 98237 - protein, 9 aa, Homo sapiens
  Table A; Target 98237; HLA-B*40:02; TYR; ENSG00000077498; TAA
RDIDFAHEA

SEQ ID NO: 98238 - protein, 8 aa, Homo sapiens
  Table A; Target 98238; HLA-B*37:01; TYR; ENSG00000077498; TAA
RESWPSVF

SEQ ID NO: 98239 - protein, 9 aa, Homo sapiens
  Table A; Target 98239; HLA-B*37:01; TYR; ENSG00000077498; TAA
RESWPSVFY

SEQ ID NO: 98240 - protein, 9 aa, Homo sapiens
  Table A; Target 98240; HLA-B*44:02; TYR; ENSG00000077498; TAA
RESWPSVFY

SEQ ID NO: 98241 - protein, 9 aa, Homo sapiens
  Table A; Target 98241; HLA-B*44:03; TYR; ENSG00000077498; TAA
RESWPSVFY

SEQ ID NO: 98242 - protein, 8 aa, Homo sapiens
  Table A; Target 98242; HLA-B*37:01; TYR; ENSG00000077498; TAA
RESYMVPF

SEQ ID NO: 98243 - protein, 9 aa, Homo sapiens
  Table A; Target 98243; HLA-B*49:01; TYR; ENSG00000077498; TAA
RESYMVPFI

SEQ ID NO: 98244 - protein, 9 aa, Homo sapiens
  Table A; Target 98244; HLA-A*30:02; TYR; ENSG00000077498; TAA
RHRPLQEVY

SEQ ID NO: 98245 - protein, 9 aa, Homo sapiens
  Table A; Target 98245; HLA-B*57:01; TYR; ENSG00000077498; TAA
RHRPLQEVY

SEQ ID NO: 98246 - protein, 9 aa, Homo sapiens
  Table A; Target 98246; HLA-A*02:04; TYR; ENSG00000077498; TAA
RIWSWLLGA

SEQ ID NO: 98247 - protein, 9 aa, Homo sapiens
  Table A; Target 98247; HLA-A*02:07; TYR; ENSG00000077498; TAA
RIWSWLLGA

SEQ ID NO: 98248 - protein, 11 aa, Homo sapiens
  Table A; Target 98248; HLA-A*02:07; TYR; ENSG00000077498; TAA
RLEEYNSHQSL

SEQ ID NO: 98249 - protein, 10 aa, Homo sapiens
  Table A; Target 98249; HLA-A*02:07; TYR; ENSG00000077498; TAA
RLPSSADVEF

SEQ ID NO: 98250 - protein, 10 aa, Homo sapiens
  Table A; Target 98250; HLA-B*15:01; TYR; ENSG00000077498; TAA
RLPSSADVEF

SEQ ID NO: 98251 - protein, 10 aa, Homo sapiens
  Table A; Target 98251; HLA-B*54:01; TYR; ENSG00000077498; TAA
RPLQEVYPEA

SEQ ID NO: 98252 - protein, 10 aa, Homo sapiens
  Table A; Target 98252; HLA-B*55:01; TYR; ENSG00000077498; TAA
RPLQEVYPEA

SEQ ID NO: 98253 - protein, 10 aa, Homo sapiens
  Table A; Target 98253; HLA-B*56:01; TYR; ENSG00000077498; TAA
RPLQEVYPEA

SEQ ID NO: 98254 - protein, 9 aa, Homo sapiens
  Table A; Target 98254; HLA-B*27:05; TYR; ENSG00000077498; TAA
RRNPGNHDK

SEQ ID NO: 98255 - protein, 8 aa, Homo sapiens
  Table A; Target 98255; HLA-B*35:03; TYR; ENSG00000077498; TAA
SADVEFCL

SEQ ID NO: 98256 - protein, 8 aa, Homo sapiens
  Table A; Target 98256; HLA-C*05:01; TYR; ENSG00000077498; TAA
SADVEFCL

SEQ ID NO: 98257 - protein, 8 aa, Homo sapiens
  Table A; Target 98257; HLA-B*54:01; TYR; ENSG00000077498; TAA
SAGHFPRA

SEQ ID NO: 98258 - protein, 8 aa, Homo sapiens
  Table A; Target 98258; HLA-C*03:04; TYR; ENSG00000077498; TAA
SANDPIFL

SEQ ID NO: 98259 - protein, 8 aa, Homo sapiens
  Table A; Target 98259; HLA-C*05:01; TYR; ENSG00000077498; TAA
SANDPIFL

SEQ ID NO: 98260 - protein, 9 aa, Homo sapiens
  Table A; Target 98260; HLA-A*02:01; TYR; ENSG00000077498; TAA
SANDPIFLL

SEQ ID NO: 98261 - protein, 9 aa, Homo sapiens
  Table A; Target 98261; HLA-A*02:04; TYR; ENSG00000077498; TAA
SANDPIFLL

SEQ ID NO: 98262 - protein, 9 aa, Homo sapiens
  Table A; Target 98262; HLA-A*02:07; TYR; ENSG00000077498; TAA
SANDPIFLL

SEQ ID NO: 98263 - protein, 9 aa, Homo sapiens
  Table A; Target 98263; HLA-A*03:01; TYR; ENSG00000077498; TAA
SANDPIFLL

SEQ ID NO: 98264 - protein, 9 aa, Homo sapiens
  Table A; Target 98264; HLA-A*03:02; TYR; ENSG00000077498; TAA
SANDPIFLL

SEQ ID NO: 98265 - protein, 9 aa, Homo sapiens
  Table A; Target 98265; HLA-A*11:01; TYR; ENSG00000077498; TAA
SANDPIFLL

SEQ ID NO: 98266 - protein, 9 aa, Homo sapiens
  Table A; Target 98266; HLA-A*23:01; TYR; ENSG00000077498; TAA
SANDPIFLL

SEQ ID NO: 98267 - protein, 9 aa, Homo sapiens
  Table A; Target 98267; HLA-A*24:02; TYR; ENSG00000077498; TAA
SANDPIFLL

SEQ ID NO: 98268 - protein, 9 aa, Homo sapiens
  Table A; Target 98268; HLA-A*25:01; TYR; ENSG00000077498; TAA
SANDPIFLL

SEQ ID NO: 98269 - protein, 9 aa, Homo sapiens
  Table A; Target 98269; HLA-A*26:01; TYR; ENSG00000077498; TAA
SANDPIFLL

SEQ ID NO: 98270 - protein, 9 aa, Homo sapiens
  Table A; Target 98270; HLA-A*29:02; TYR; ENSG00000077498; TAA
SANDPIFLL

SEQ ID NO: 98271 - protein, 9 aa, Homo sapiens
  Table A; Target 98271; HLA-A*30:01; TYR; ENSG00000077498; TAA
SANDPIFLL

SEQ ID NO: 98272 - protein, 9 aa, Homo sapiens
  Table A; Target 98272; HLA-A*30:02; TYR; ENSG00000077498; TAA
SANDPIFLL

SEQ ID NO: 98273 - protein, 9 aa, Homo sapiens
  Table A; Target 98273; HLA-A*31:01; TYR; ENSG00000077498; TAA
SANDPIFLL

SEQ ID NO: 98274 - protein, 9 aa, Homo sapiens
  Table A; Target 98274; HLA-A*33:01; TYR; ENSG00000077498; TAA
SANDPIFLL

SEQ ID NO: 98275 - protein, 9 aa, Homo sapiens
  Table A; Target 98275; HLA-A*33:03; TYR; ENSG00000077498; TAA
SANDPIFLL

SEQ ID NO: 98276 - protein, 9 aa, Homo sapiens
  Table A; Target 98276; HLA-A*68:01; TYR; ENSG00000077498; TAA
SANDPIFLL

SEQ ID NO: 98277 - protein, 9 aa, Homo sapiens
  Table A; Target 98277; HLA-A*68:02; TYR; ENSG00000077498; TAA
SANDPIFLL

SEQ ID NO: 98278 - protein, 9 aa, Homo sapiens
  Table A; Target 98278; HLA-B*13:02; TYR; ENSG00000077498; TAA
SANDPIFLL

SEQ ID NO: 98279 - protein, 9 aa, Homo sapiens
  Table A; Target 98279; HLA-B*35:01; TYR; ENSG00000077498; TAA
SANDPIFLL

SEQ ID NO: 98280 - protein, 9 aa, Homo sapiens
  Table A; Target 98280; HLA-B*35:03; TYR; ENSG00000077498; TAA
SANDPIFLL

SEQ ID NO: 98281 - protein, 9 aa, Homo sapiens
  Table A; Target 98281; HLA-B*38:01; TYR; ENSG00000077498; TAA
SANDPIFLL

SEQ ID NO: 98282 - protein, 9 aa, Homo sapiens
  Table A; Target 98282; HLA-B*39:01; TYR; ENSG00000077498; TAA
SANDPIFLL

SEQ ID NO: 98283 - protein, 9 aa, Homo sapiens
  Table A; Target 98283; HLA-B*44:02; TYR; ENSG00000077498; TAA
SANDPIFLL

SEQ ID NO: 98284 - protein, 9 aa, Homo sapiens
  Table A; Target 98284; HLA-B*44:03; TYR; ENSG00000077498; TAA
SANDPIFLL

SEQ ID NO: 98285 - protein, 9 aa, Homo sapiens
  Table A; Target 98285; HLA-B*51:01; TYR; ENSG00000077498; TAA
SANDPIFLL

SEQ ID NO: 98286 - protein, 9 aa, Homo sapiens
  Table A; Target 98286; HLA-B*57:01; TYR; ENSG00000077498; TAA
SANDPIFLL

SEQ ID NO: 98287 - protein, 9 aa, Homo sapiens
  Table A; Target 98287; HLA-B*58:01; TYR; ENSG00000077498; TAA
SANDPIFLL

SEQ ID NO: 98288 - protein, 9 aa, Homo sapiens
  Table A; Target 98288; HLA-C*02:02; TYR; ENSG00000077498; TAA
SANDPIFLL

SEQ ID NO: 98289 - protein, 9 aa, Homo sapiens
  Table A; Target 98289; HLA-C*03:03; TYR; ENSG00000077498; TAA
SANDPIFLL

SEQ ID NO: 98290 - protein, 9 aa, Homo sapiens
  Table A; Target 98290; HLA-C*03:04; TYR; ENSG00000077498; TAA
SANDPIFLL

SEQ ID NO: 98291 - protein, 9 aa, Homo sapiens
  Table A; Target 98291; HLA-C*05:01; TYR; ENSG00000077498; TAA
SANDPIFLL

SEQ ID NO: 98292 - protein, 9 aa, Homo sapiens
  Table A; Target 98292; HLA-C*06:02; TYR; ENSG00000077498; TAA
SANDPIFLL

SEQ ID NO: 98293 - protein, 9 aa, Homo sapiens
  Table A; Target 98293; HLA-C*07:04; TYR; ENSG00000077498; TAA
SANDPIFLL

SEQ ID NO: 98294 - protein, 9 aa, Homo sapiens
  Table A; Target 98294; HLA-C*07:06; TYR; ENSG00000077498; TAA
SANDPIFLL

SEQ ID NO: 98295 - protein, 9 aa, Homo sapiens
  Table A; Target 98295; HLA-C*12:03; TYR; ENSG00000077498; TAA
SANDPIFLL

SEQ ID NO: 98296 - protein, 9 aa, Homo sapiens
  Table A; Target 98296; HLA-C*16:01; TYR; ENSG00000077498; TAA
SANDPIFLL

SEQ ID NO: 98297 - protein, 9 aa, Homo sapiens
  Table A; Target 98297; HLA-C*16:02; TYR; ENSG00000077498; TAA
SANDPIFLL

SEQ ID NO: 98298 - protein, 9 aa, Homo sapiens
  Table A; Target 98298; HLA-C*16:04; TYR; ENSG00000077498; TAA
SANDPIFLL

SEQ ID NO: 98299 - protein, 10 aa, Homo sapiens
  Table A; Target 98299; HLA-A*03:01; TYR; ENSG00000077498; TAA
SANDPIFLLH

SEQ ID NO: 98300 - protein, 10 aa, Homo sapiens
  Table A; Target 98300; HLA-A*11:01; TYR; ENSG00000077498; TAA
SANDPIFLLH

SEQ ID NO: 98301 - protein, 10 aa, Homo sapiens
  Table A; Target 98301; HLA-A*29:02; TYR; ENSG00000077498; TAA
SANDPIFLLH

SEQ ID NO: 98302 - protein, 10 aa, Homo sapiens
  Table A; Target 98302; HLA-C*02:02; TYR; ENSG00000077498; TAA
SANDPIFLLH

SEQ ID NO: 98303 - protein, 10 aa, Homo sapiens
  Table A; Target 98303; HLA-C*07:06; TYR; ENSG00000077498; TAA
SANDPIFLLH

SEQ ID NO: 98304 - protein, 11 aa, Homo sapiens
  Table A; Target 98304; HLA-A*02:07; TYR; ENSG00000077498; TAA
SAPEKDKFFAY

SEQ ID NO: 98305 - protein, 11 aa, Homo sapiens
  Table A; Target 98305; HLA-A*29:02; TYR; ENSG00000077498; TAA
SAPEKDKFFAY

SEQ ID NO: 98306 - protein, 9 aa, Homo sapiens
  Table A; Target 98306; HLA-C*01:02; TYR; ENSG00000077498; TAA
SDPDSFQDY

SEQ ID NO: 98307 - protein, 9 aa, Homo sapiens
  Table A; Target 98307; HLA-B*37:01; TYR; ENSG00000077498; TAA
SDYVIPIGT

SEQ ID NO: 98308 - protein, 9 aa, Homo sapiens
  Table A; Target 98308; HLA-B*40:02; TYR; ENSG00000077498; TAA
SDYVIPIGT

SEQ ID NO: 98309 - protein, 9 aa, Homo sapiens
  Table A; Target 98309; HLA-C*06:02; TYR; ENSG00000077498; TAA
SDYVIPIGT

SEQ ID NO: 98310 - protein, 9 aa, Homo sapiens
  Table A; Target 98310; HLA-C*07:04; TYR; ENSG00000077498; TAA
SDYVIPIGT

SEQ ID NO: 98311 - protein, 10 aa, Homo sapiens
  Table A; Target 98311; HLA-A*25:01; TYR; ENSG00000077498; TAA
SDYVIPIGTY

SEQ ID NO: 98312 - protein, 10 aa, Homo sapiens
  Table A; Target 98312; HLA-A*26:01; TYR; ENSG00000077498; TAA
SDYVIPIGTY

SEQ ID NO: 98313 - protein, 10 aa, Homo sapiens
  Table A; Target 98313; HLA-A*30:02; TYR; ENSG00000077498; TAA
SDYVIPIGTY

SEQ ID NO: 98314 - protein, 10 aa, Homo sapiens
  Table A; Target 98314; HLA-B*15:03; TYR; ENSG00000077498; TAA
SDYVIPIGTY

SEQ ID NO: 98315 - protein, 10 aa, Homo sapiens
  Table A; Target 98315; HLA-B*18:01; TYR; ENSG00000077498; TAA
SDYVIPIGTY

SEQ ID NO: 98316 - protein, 10 aa, Homo sapiens
  Table A; Target 98316; HLA-B*44:02; TYR; ENSG00000077498; TAA
SDYVIPIGTY

SEQ ID NO: 98317 - protein, 10 aa, Homo sapiens
  Table A; Target 98317; HLA-B*44:03; TYR; ENSG00000077498; TAA
SDYVIPIGTY

SEQ ID NO: 98318 - protein, 10 aa, Homo sapiens
  Table A; Target 98318; HLA-C*04:01; TYR; ENSG00000077498; TAA
SDYVIPIGTY

SEQ ID NO: 98319 - protein, 10 aa, Homo sapiens
  Table A; Target 98319; HLA-C*16:04; TYR; ENSG00000077498; TAA
SDYVIPIGTY

SEQ ID NO: 98320 - protein, 9 aa, Homo sapiens
  Table A; Target 98320; HLA-B*37:01; TYR; ENSG00000077498; TAA
SEIWRDIDF

SEQ ID NO: 98321 - protein, 9 aa, Homo sapiens
  Table A; Target 98321; HLA-B*44:02; TYR; ENSG00000077498; TAA
SEIWRDIDF

SEQ ID NO: 98322 - protein, 9 aa, Homo sapiens
  Table A; Target 98322; HLA-B*44:03; TYR; ENSG00000077498; TAA
SEIWRDIDF

SEQ ID NO: 98323 - protein, 9 aa, Homo sapiens
  Table A; Target 98323; HLA-A*29:02; TYR; ENSG00000077498; TAA
SFQDYIKSY

SEQ ID NO: 98324 - protein, 9 aa, Homo sapiens
  Table A; Target 98324; HLA-A*30:02; TYR; ENSG00000077498; TAA
SFQDYIKSY

SEQ ID NO: 98325 - protein, 9 aa, Homo sapiens
  Table A; Target 98325; HLA-A*32:01; TYR; ENSG00000077498; TAA
SFQDYIKSY

SEQ ID NO: 98326 - protein, 9 aa, Homo sapiens
  Table A; Target 98326; HLA-B*44:02; TYR; ENSG00000077498; TAA
SFQDYIKSY

SEQ ID NO: 98327 - protein, 9 aa, Homo sapiens
  Table A; Target 98327; HLA-B*44:03; TYR; ENSG00000077498; TAA
SFQDYIKSY

SEQ ID NO: 98328 - protein, 9 aa, Homo sapiens
  Table A; Target 98328; HLA-C*01:02; TYR; ENSG00000077498; TAA
SFQDYIKSY

SEQ ID NO: 98329 - protein, 9 aa, Homo sapiens
  Table A; Target 98329; HLA-C*12:03; TYR; ENSG00000077498; TAA
SFQDYIKSY

SEQ ID NO: 98330 - protein, 9 aa, Homo sapiens
  Table A; Target 98330; HLA-C*14:02; TYR; ENSG00000077498; TAA
SFQDYIKSY

SEQ ID NO: 98331 - protein, 9 aa, Homo sapiens
  Table A; Target 98331; HLA-C*16:01; TYR; ENSG00000077498; TAA
SFQDYIKSY

SEQ ID NO: 98332 - protein, 9 aa, Homo sapiens
  Table A; Target 98332; HLA-C*16:02; TYR; ENSG00000077498; TAA
SFQDYIKSY

SEQ ID NO: 98333 - protein, 9 aa, Homo sapiens
  Table A; Target 98333; HLA-A*23:01; TYR; ENSG00000077498; TAA
SFQTSAGHF

SEQ ID NO: 98334 - protein, 9 aa, Homo sapiens
  Table A; Target 98334; HLA-A*24:02; TYR; ENSG00000077498; TAA
SFQTSAGHF

SEQ ID NO: 98335 - protein, 9 aa, Homo sapiens
  Table A; Target 98335; HLA-C*01:02; TYR; ENSG00000077498; TAA
SFQTSAGHF

SEQ ID NO: 98336 - protein, 9 aa, Homo sapiens
  Table A; Target 98336; HLA-C*04:01; TYR; ENSG00000077498; TAA
SFQTSAGHF

SEQ ID NO: 98337 - protein, 9 aa, Homo sapiens
  Table A; Target 98337; HLA-C*14:02; TYR; ENSG00000077498; TAA
SFQTSAGHF

SEQ ID NO: 98338 - protein, 11 aa, Homo sapiens
  Table A; Target 98338; HLA-A*31:01; TYR; ENSG00000077498; TAA
SFQTSAGHFPR

SEQ ID NO: 98339 - protein, 11 aa, Homo sapiens
  Table A; Target 98339; HLA-A*33:01; TYR; ENSG00000077498; TAA
SFQTSAGHFPR

SEQ ID NO: 98340 - protein, 11 aa, Homo sapiens
  Table A; Target 98340; HLA-A*33:03; TYR; ENSG00000077498; TAA
SFQTSAGHFPR

SEQ ID NO: 98341 - protein, 9 aa, Homo sapiens
  Table A; Target 98341; HLA-A*23:01; TYR; ENSG00000077498; TAA
SFRNTLEGF

SEQ ID NO: 98342 - protein, 9 aa, Homo sapiens
  Table A; Target 98342; HLA-A*24:02; TYR; ENSG00000077498; TAA
SFRNTLEGF

SEQ ID NO: 98343 - protein, 9 aa, Homo sapiens
  Table A; Target 98343; HLA-A*02:04; TYR; ENSG00000077498; TAA
SIFEQWLRR

SEQ ID NO: 98344 - protein, 9 aa, Homo sapiens
  Table A; Target 98344; HLA-A*29:02; TYR; ENSG00000077498; TAA
SIFEQWLRR

SEQ ID NO: 98345 - protein, 8 aa, Homo sapiens
  Table A; Target 98345; HLA-B*15:03; TYR; ENSG00000077498; TAA
SKDLGYDY

SEQ ID NO: 98346 - protein, 10 aa, Homo sapiens
  Table A; Target 98346; HLA-B*39:01; TYR; ENSG00000077498; TAA
SLTQYESGSM

SEQ ID NO: 98347 - protein, 11 aa, Homo sapiens
  Table A; Target 98347; HLA-C*04:01; TYR; ENSG00000077498; TAA
SMDALLGGSEI

SEQ ID NO: 98348 - protein, 8 aa, Homo sapiens
  Table A; Target 98348; HLA-A*32:01; TYR; ENSG00000077498; TAA
SMDKAANF

SEQ ID NO: 98349 - protein, 8 aa, Homo sapiens
  Table A; Target 98349; HLA-B*18:01; TYR; ENSG00000077498; TAA
SMDKAANF

SEQ ID NO: 98350 - protein, 8 aa, Homo sapiens
  Table A; Target 98350; HLA-B*37:01; TYR; ENSG00000077498; TAA
SMDKAANF

SEQ ID NO: 98351 - protein, 8 aa, Homo sapiens
  Table A; Target 98351; HLA-C*04:01; TYR; ENSG00000077498; TAA
SMDKAANF

SEQ ID NO: 98352 - protein, 8 aa, Homo sapiens
  Table A; Target 98352; HLA-C*05:01; TYR; ENSG00000077498; TAA
SMDKAANF

SEQ ID NO: 98353 - protein, 8 aa, Homo sapiens
  Table A; Target 98353; HLA-C*07:04; TYR; ENSG00000077498; TAA
SMDKAANF

SEQ ID NO: 98354 - protein, 10 aa, Homo sapiens
  Table A; Target 98354; HLA-A*01:01; TYR; ENSG00000077498; TAA
SMDKAANFSF

SEQ ID NO: 98355 - protein, 10 aa, Homo sapiens
  Table A; Target 98355; HLA-A*02:01; TYR; ENSG00000077498; TAA
SMDKAANFSF

SEQ ID NO: 98356 - protein, 10 aa, Homo sapiens
  Table A; Target 98356; HLA-A*02:07; TYR; ENSG00000077498; TAA
SMDKAANFSF

SEQ ID NO: 98357 - protein, 10 aa, Homo sapiens
  Table A; Target 98357; HLA-A*24:02; TYR; ENSG00000077498; TAA
SMDKAANFSF

SEQ ID NO: 98358 - protein, 10 aa, Homo sapiens
  Table A; Target 98358; HLA-A*32:01; TYR; ENSG00000077498; TAA
SMDKAANFSF

SEQ ID NO: 98359 - protein, 10 aa, Homo sapiens
  Table A; Target 98359; HLA-B*38:01; TYR; ENSG00000077498; TAA
SMDKAANFSF

SEQ ID NO: 98360 - protein, 10 aa, Homo sapiens
  Table A; Target 98360; HLA-B*55:01; TYR; ENSG00000077498; TAA
SMDKAANFSF

SEQ ID NO: 98361 - protein, 10 aa, Homo sapiens
  Table A; Target 98361; HLA-B*57:01; TYR; ENSG00000077498; TAA
SMDKAANFSF

SEQ ID NO: 98362 - protein, 10 aa, Homo sapiens
  Table A; Target 98362; HLA-B*58:01; TYR; ENSG00000077498; TAA
SMDKAANFSF

SEQ ID NO: 98363 - protein, 10 aa, Homo sapiens
  Table A; Target 98363; HLA-C*04:01; TYR; ENSG00000077498; TAA
SMDKAANFSF

SEQ ID NO: 98364 - protein, 10 aa, Homo sapiens
  Table A; Target 98364; HLA-C*05:01; TYR; ENSG00000077498; TAA
SMDKAANFSF

SEQ ID NO: 98365 - protein, 8 aa, Homo sapiens
  Table A; Target 98365; HLA-B*13:02; TYR; ENSG00000077498; TAA
SMHNALHI

SEQ ID NO: 98366 - protein, 9 aa, Homo sapiens
  Table A; Target 98366; HLA-A*01:01; TYR; ENSG00000077498; TAA
SMHNALHIY

SEQ ID NO: 98367 - protein, 9 aa, Homo sapiens
  Table A; Target 98367; HLA-A*29:02; TYR; ENSG00000077498; TAA
SMHNALHIY

SEQ ID NO: 98368 - protein, 9 aa, Homo sapiens
  Table A; Target 98368; HLA-A*30:02; TYR; ENSG00000077498; TAA
SMHNALHIY

SEQ ID NO: 98369 - protein, 9 aa, Homo sapiens
  Table A; Target 98369; HLA-B*15:01; TYR; ENSG00000077498; TAA
SMHNALHIY

SEQ ID NO: 98370 - protein, 9 aa, Homo sapiens
  Table A; Target 98370; HLA-B*46:01; TYR; ENSG00000077498; TAA
SMHNALHIY

SEQ ID NO: 98371 - protein, 9 aa, Homo sapiens
  Table A; Target 98371; HLA-C*07:04; TYR; ENSG00000077498; TAA
SMHNALHIY

SEQ ID NO: 98372 - protein, 9 aa, Homo sapiens
  Table A; Target 98372; HLA-A*23:01; TYR; ENSG00000077498; TAA
SNAPLGPQF

SEQ ID NO: 98373 - protein, 9 aa, Homo sapiens
  Table A; Target 98373; HLA-A*24:02; TYR; ENSG00000077498; TAA
SNAPLGPQF

SEQ ID NO: 98374 - protein, 9 aa, Homo sapiens
  Table A; Target 98374; HLA-A*25:01; TYR; ENSG00000077498; TAA
SNAPLGPQF

SEQ ID NO: 98375 - protein, 9 aa, Homo sapiens
  Table A; Target 98375; HLA-A*26:01; TYR; ENSG00000077498; TAA
SNAPLGPQF

SEQ ID NO: 98376 - protein, 9 aa, Homo sapiens
  Table A; Target 98376; HLA-A*29:02; TYR; ENSG00000077498; TAA
SNAPLGPQF

SEQ ID NO: 98377 - protein, 9 aa, Homo sapiens
  Table A; Target 98377; HLA-A*32:01; TYR; ENSG00000077498; TAA
SNAPLGPQF

SEQ ID NO: 98378 - protein, 9 aa, Homo sapiens
  Table A; Target 98378; HLA-B*15:03; TYR; ENSG00000077498; TAA
SNAPLGPQF

SEQ ID NO: 98379 - protein, 9 aa, Homo sapiens
  Table A; Target 98379; HLA-B*18:01; TYR; ENSG00000077498; TAA
SNAPLGPQF

SEQ ID NO: 98380 - protein, 9 aa, Homo sapiens
  Table A; Target 98380; HLA-B*35:01; TYR; ENSG00000077498; TAA
SNAPLGPQF

SEQ ID NO: 98381 - protein, 9 aa, Homo sapiens
  Table A; Target 98381; HLA-B*38:01; TYR; ENSG00000077498; TAA
SNAPLGPQF

SEQ ID NO: 98382 - protein, 9 aa, Homo sapiens
  Table A; Target 98382; HLA-B*39:01; TYR; ENSG00000077498; TAA
SNAPLGPQF

SEQ ID NO: 98383 - protein, 9 aa, Homo sapiens
  Table A; Target 98383; HLA-B*44:02; TYR; ENSG00000077498; TAA
SNAPLGPQF

SEQ ID NO: 98384 - protein, 9 aa, Homo sapiens
  Table A; Target 98384; HLA-B*44:03; TYR; ENSG00000077498; TAA
SNAPLGPQF

SEQ ID NO: 98385 - protein, 9 aa, Homo sapiens
  Table A; Target 98385; HLA-B*58:01; TYR; ENSG00000077498; TAA
SNAPLGPQF

SEQ ID NO: 98386 - protein, 9 aa, Homo sapiens
  Table A; Target 98386; HLA-C*02:02; TYR; ENSG00000077498; TAA
SNAPLGPQF

SEQ ID NO: 98387 - protein, 9 aa, Homo sapiens
  Table A; Target 98387; HLA-C*03:03; TYR; ENSG00000077498; TAA
SNAPLGPQF

SEQ ID NO: 98388 - protein, 9 aa, Homo sapiens
  Table A; Target 98388; HLA-C*16:01; TYR; ENSG00000077498; TAA
SNAPLGPQF

SEQ ID NO: 98389 - protein, 9 aa, Homo sapiens
  Table A; Target 98389; HLA-C*16:04; TYR; ENSG00000077498; TAA
SNAPLGPQF

SEQ ID NO: 98390 - protein, 9 aa, Homo sapiens
  Table A; Target 98390; HLA-A*24:02; TYR; ENSG00000077498; TAA
SPASFFSSW

SEQ ID NO: 98391 - protein, 9 aa, Homo sapiens
  Table A; Target 98391; HLA-A*25:01; TYR; ENSG00000077498; TAA
SPASFFSSW

SEQ ID NO: 98392 - protein, 9 aa, Homo sapiens
  Table A; Target 98392; HLA-A*26:01; TYR; ENSG00000077498; TAA
SPASFFSSW

SEQ ID NO: 98393 - protein, 9 aa, Homo sapiens
  Table A; Target 98393; HLA-A*33:03; TYR; ENSG00000077498; TAA
SPASFFSSW

SEQ ID NO: 98394 - protein, 9 aa, Homo sapiens
  Table A; Target 98394; HLA-B*07:02; TYR; ENSG00000077498; TAA
SPASFFSSW

SEQ ID NO: 98395 - protein, 9 aa, Homo sapiens
  Table A; Target 98395; HLA-B*35:01; TYR; ENSG00000077498; TAA
SPASFFSSW

SEQ ID NO: 98396 - protein, 9 aa, Homo sapiens
  Table A; Target 98396; HLA-B*44:02; TYR; ENSG00000077498; TAA
SPASFFSSW

SEQ ID NO: 98397 - protein, 9 aa, Homo sapiens
  Table A; Target 98397; HLA-B*44:03; TYR; ENSG00000077498; TAA
SPASFFSSW

SEQ ID NO: 98398 - protein, 9 aa, Homo sapiens
  Table A; Target 98398; HLA-B*51:01; TYR; ENSG00000077498; TAA
SPASFFSSW

SEQ ID NO: 98399 - protein, 9 aa, Homo sapiens
  Table A; Target 98399; HLA-B*54:01; TYR; ENSG00000077498; TAA
SPASFFSSW

SEQ ID NO: 98400 - protein, 9 aa, Homo sapiens
  Table A; Target 98400; HLA-B*55:01; TYR; ENSG00000077498; TAA
SPASFFSSW

SEQ ID NO: 98401 - protein, 9 aa, Homo sapiens
  Table A; Target 98401; HLA-B*56:01; TYR; ENSG00000077498; TAA
SPASFFSSW

SEQ ID NO: 98402 - protein, 9 aa, Homo sapiens
  Table A; Target 98402; HLA-B*57:01; TYR; ENSG00000077498; TAA
SPASFFSSW

SEQ ID NO: 98403 - protein, 9 aa, Homo sapiens
  Table A; Target 98403; HLA-C*02:02; TYR; ENSG00000077498; TAA
SPASFFSSW

SEQ ID NO: 98404 - protein, 9 aa, Homo sapiens
  Table A; Target 98404; HLA-C*07:02; TYR; ENSG00000077498; TAA
SPASFFSSW

SEQ ID NO: 98405 - protein, 9 aa, Homo sapiens
  Table A; Target 98405; HLA-B*35:03; TYR; ENSG00000077498; TAA
SPLTGIADA

SEQ ID NO: 98406 - protein, 9 aa, Homo sapiens
  Table A; Target 98406; HLA-B*54:01; TYR; ENSG00000077498; TAA
SPLTGIADA

SEQ ID NO: 98407 - protein, 9 aa, Homo sapiens
  Table A; Target 98407; HLA-B*55:01; TYR; ENSG00000077498; TAA
SPLTGIADA

SEQ ID NO: 98408 - protein, 9 aa, Homo sapiens
  Table A; Target 98408; HLA-B*56:01; TYR; ENSG00000077498; TAA
SPLTGIADA

SEQ ID NO: 98409 - protein, 10 aa, Homo sapiens
  Table A; Target 98409; HLA-B*27:02; TYR; ENSG00000077498; TAA
SPLTGIADAS

SEQ ID NO: 98410 - protein, 11 aa, Homo sapiens
  Table A; Target 98410; HLA-B*55:01; TYR; ENSG00000077498; TAA
SPLTGIADASQ

SEQ ID NO: 98411 - protein, 11 aa, Homo sapiens
  Table A; Target 98411; HLA-C*04:01; TYR; ENSG00000077498; TAA
SPLTGIADASQ

SEQ ID NO: 98412 - protein, 9 aa, Homo sapiens
  Table A; Target 98412; HLA-A*02:04; TYR; ENSG00000077498; TAA
SQSSMHNAL

SEQ ID NO: 98413 - protein, 9 aa, Homo sapiens
  Table A; Target 98413; HLA-A*24:02; TYR; ENSG00000077498; TAA
SQSSMHNAL

SEQ ID NO: 98414 - protein, 9 aa, Homo sapiens
  Table A; Target 98414; HLA-A*30:01; TYR; ENSG00000077498; TAA
SQSSMHNAL

SEQ ID NO: 98415 - protein, 9 aa, Homo sapiens
  Table A; Target 98415; HLA-A*32:01; TYR; ENSG00000077498; TAA
SQSSMHNAL

SEQ ID NO: 98416 - protein, 9 aa, Homo sapiens
  Table A; Target 98416; HLA-A*68:02; TYR; ENSG00000077498; TAA
SQSSMHNAL

SEQ ID NO: 98417 - protein, 9 aa, Homo sapiens
  Table A; Target 98417; HLA-B*07:02; TYR; ENSG00000077498; TAA
SQSSMHNAL

SEQ ID NO: 98418 - protein, 9 aa, Homo sapiens
  Table A; Target 98418; HLA-B*13:02; TYR; ENSG00000077498; TAA
SQSSMHNAL

SEQ ID NO: 98419 - protein, 9 aa, Homo sapiens
  Table A; Target 98419; HLA-B*15:01; TYR; ENSG00000077498; TAA
SQSSMHNAL

SEQ ID NO: 98420 - protein, 9 aa, Homo sapiens
  Table A; Target 98420; HLA-B*15:03; TYR; ENSG00000077498; TAA
SQSSMHNAL

SEQ ID NO: 98421 - protein, 9 aa, Homo sapiens
  Table A; Target 98421; HLA-B*27:05; TYR; ENSG00000077498; TAA
SQSSMHNAL

SEQ ID NO: 98422 - protein, 9 aa, Homo sapiens
  Table A; Target 98422; HLA-B*35:03; TYR; ENSG00000077498; TAA
SQSSMHNAL

SEQ ID NO: 98423 - protein, 9 aa, Homo sapiens
  Table A; Target 98423; HLA-B*37:01; TYR; ENSG00000077498; TAA
SQSSMHNAL

SEQ ID NO: 98424 - protein, 9 aa, Homo sapiens
  Table A; Target 98424; HLA-B*38:01; TYR; ENSG00000077498; TAA
SQSSMHNAL

SEQ ID NO: 98425 - protein, 9 aa, Homo sapiens
  Table A; Target 98425; HLA-B*39:01; TYR; ENSG00000077498; TAA
SQSSMHNAL

SEQ ID NO: 98426 - protein, 9 aa, Homo sapiens
  Table A; Target 98426; HLA-B*40:01; TYR; ENSG00000077498; TAA
SQSSMHNAL

SEQ ID NO: 98427 - protein, 9 aa, Homo sapiens
  Table A; Target 98427; HLA-B*40:02; TYR; ENSG00000077498; TAA
SQSSMHNAL

SEQ ID NO: 98428 - protein, 9 aa, Homo sapiens
  Table A; Target 98428; HLA-C*01:02; TYR; ENSG00000077498; TAA
SQSSMHNAL

SEQ ID NO: 98429 - protein, 9 aa, Homo sapiens
  Table A; Target 98429; HLA-C*02:02; TYR; ENSG00000077498; TAA
SQSSMHNAL

SEQ ID NO: 98430 - protein, 9 aa, Homo sapiens
  Table A; Target 98430; HLA-C*04:01; TYR; ENSG00000077498; TAA
SQSSMHNAL

SEQ ID NO: 98431 - protein, 9 aa, Homo sapiens
  Table A; Target 98431; HLA-C*06:02; TYR; ENSG00000077498; TAA
SQSSMHNAL

SEQ ID NO: 98432 - protein, 9 aa, Homo sapiens
  Table A; Target 98432; HLA-C*07:02; TYR; ENSG00000077498; TAA
SQSSMHNAL

SEQ ID NO: 98433 - protein, 9 aa, Homo sapiens
  Table A; Target 98433; HLA-C*07:04; TYR; ENSG00000077498; TAA
SQSSMHNAL

SEQ ID NO: 98434 - protein, 9 aa, Homo sapiens
  Table A; Target 98434; HLA-C*12:03; TYR; ENSG00000077498; TAA
SQSSMHNAL

SEQ ID NO: 98435 - protein, 9 aa, Homo sapiens
  Table A; Target 98435; HLA-C*14:02; TYR; ENSG00000077498; TAA
SQSSMHNAL

SEQ ID NO: 98436 - protein, 9 aa, Homo sapiens
  Table A; Target 98436; HLA-C*16:01; TYR; ENSG00000077498; TAA
SQSSMHNAL

SEQ ID NO: 98437 - protein, 9 aa, Homo sapiens
  Table A; Target 98437; HLA-C*16:02; TYR; ENSG00000077498; TAA
SQSSMHNAL

SEQ ID NO: 98438 - protein, 9 aa, Homo sapiens
  Table A; Target 98438; HLA-C*16:04; TYR; ENSG00000077498; TAA
SQSSMHNAL

SEQ ID NO: 98439 - protein, 11 aa, Homo sapiens
  Table A; Target 98439; HLA-B*13:02; TYR; ENSG00000077498; TAA
SQSSMHNALHI

SEQ ID NO: 98440 - protein, 11 aa, Homo sapiens
  Table A; Target 98440; HLA-B*13:02; TYR; ENSG00000077498; TAA
SQVQGSANDPI

SEQ ID NO: 98441 - protein, 11 aa, Homo sapiens
  Table A; Target 98441; HLA-B*27:05; TYR; ENSG00000077498; TAA
SQVQGSANDPI

SEQ ID NO: 98442 - protein, 11 aa, Homo sapiens
  Table A; Target 98442; HLA-B*38:01; TYR; ENSG00000077498; TAA
SQVQGSANDPI

SEQ ID NO: 98443 - protein, 11 aa, Homo sapiens
  Table A; Target 98443; HLA-B*39:01; TYR; ENSG00000077498; TAA
SQVQGSANDPI

SEQ ID NO: 98444 - protein, 11 aa, Homo sapiens
  Table A; Target 98444; HLA-C*06:02; TYR; ENSG00000077498; TAA
SQVQGSANDPI

SEQ ID NO: 98445 - protein, 9 aa, Homo sapiens
  Table A; Target 98445; HLA-B*27:05; TYR; ENSG00000077498; TAA
SRLEEYNSH

SEQ ID NO: 98446 - protein, 9 aa, Homo sapiens
  Table A; Target 98446; HLA-A*02:01; TYR; ENSG00000077498; TAA
SSADVEFCL

SEQ ID NO: 98447 - protein, 9 aa, Homo sapiens
  Table A; Target 98447; HLA-A*11:01; TYR; ENSG00000077498; TAA
SSADVEFCL

SEQ ID NO: 98448 - protein, 9 aa, Homo sapiens
  Table A; Target 98448; HLA-A*30:01; TYR; ENSG00000077498; TAA
SSADVEFCL

SEQ ID NO: 98449 - protein, 9 aa, Homo sapiens
  Table A; Target 98449; HLA-A*68:02; TYR; ENSG00000077498; TAA
SSADVEFCL

SEQ ID NO: 98450 - protein, 9 aa, Homo sapiens
  Table A; Target 98450; HLA-B*13:02; TYR; ENSG00000077498; TAA
SSADVEFCL

SEQ ID NO: 98451 - protein, 9 aa, Homo sapiens
  Table A; Target 98451; HLA-B*27:05; TYR; ENSG00000077498; TAA
SSADVEFCL

SEQ ID NO: 98452 - protein, 9 aa, Homo sapiens
  Table A; Target 98452; HLA-B*35:03; TYR; ENSG00000077498; TAA
SSADVEFCL

SEQ ID NO: 98453 - protein, 9 aa, Homo sapiens
  Table A; Target 98453; HLA-B*38:01; TYR; ENSG00000077498; TAA
SSADVEFCL

SEQ ID NO: 98454 - protein, 9 aa, Homo sapiens
  Table A; Target 98454; HLA-B*58:01; TYR; ENSG00000077498; TAA
SSADVEFCL

SEQ ID NO: 98455 - protein, 9 aa, Homo sapiens
  Table A; Target 98455; HLA-C*06:02; TYR; ENSG00000077498; TAA
SSADVEFCL

SEQ ID NO: 98456 - protein, 9 aa, Homo sapiens
  Table A; Target 98456; HLA-C*07:06; TYR; ENSG00000077498; TAA
SSADVEFCL

SEQ ID NO: 98457 - protein, 9 aa, Homo sapiens
  Table A; Target 98457; HLA-C*16:01; TYR; ENSG00000077498; TAA
SSADVEFCL

SEQ ID NO: 98458 - protein, 9 aa, Homo sapiens
  Table A; Target 98458; HLA-C*16:02; TYR; ENSG00000077498; TAA
SSADVEFCL

SEQ ID NO: 98459 - protein, 11 aa, Homo sapiens
  Table A; Target 98459; HLA-A*01:01; TYR; ENSG00000077498; TAA
SSDYVIPIGTY

SEQ ID NO: 98460 - protein, 11 aa, Homo sapiens
  Table A; Target 98460; HLA-A*30:02; TYR; ENSG00000077498; TAA
SSDYVIPIGTY

SEQ ID NO: 98461 - protein, 9 aa, Homo sapiens
  Table A; Target 98461; HLA-A*01:01; TYR; ENSG00000077498; TAA
SSKDLGYDY

SEQ ID NO: 98462 - protein, 9 aa, Homo sapiens
  Table A; Target 98462; HLA-A*25:01; TYR; ENSG00000077498; TAA
SSKDLGYDY

SEQ ID NO: 98463 - protein, 9 aa, Homo sapiens
  Table A; Target 98463; HLA-A*26:01; TYR; ENSG00000077498; TAA
SSKDLGYDY

SEQ ID NO: 98464 - protein, 9 aa, Homo sapiens
  Table A; Target 98464; HLA-A*29:02; TYR; ENSG00000077498; TAA
SSKDLGYDY

SEQ ID NO: 98465 - protein, 9 aa, Homo sapiens
  Table A; Target 98465; HLA-A*30:02; TYR; ENSG00000077498; TAA
SSKDLGYDY

SEQ ID NO: 98466 - protein, 9 aa, Homo sapiens
  Table A; Target 98466; HLA-A*32:01; TYR; ENSG00000077498; TAA
SSKDLGYDY

SEQ ID NO: 98467 - protein, 9 aa, Homo sapiens
  Table A; Target 98467; HLA-B*15:01; TYR; ENSG00000077498; TAA
SSKDLGYDY

SEQ ID NO: 98468 - protein, 9 aa, Homo sapiens
  Table A; Target 98468; HLA-B*15:03; TYR; ENSG00000077498; TAA
SSKDLGYDY

SEQ ID NO: 98469 - protein, 9 aa, Homo sapiens
  Table A; Target 98469; HLA-B*35:01; TYR; ENSG00000077498; TAA
SSKDLGYDY

SEQ ID NO: 98470 - protein, 9 aa, Homo sapiens
  Table A; Target 98470; HLA-B*46:01; TYR; ENSG00000077498; TAA
SSKDLGYDY

SEQ ID NO: 98471 - protein, 9 aa, Homo sapiens
  Table A; Target 98471; HLA-B*57:01; TYR; ENSG00000077498; TAA
SSKDLGYDY

SEQ ID NO: 98472 - protein, 9 aa, Homo sapiens
  Table A; Target 98472; HLA-B*58:01; TYR; ENSG00000077498; TAA
SSKDLGYDY

SEQ ID NO: 98473 - protein, 9 aa, Homo sapiens
  Table A; Target 98473; HLA-C*02:02; TYR; ENSG00000077498; TAA
SSKDLGYDY

SEQ ID NO: 98474 - protein, 9 aa, Homo sapiens
  Table A; Target 98474; HLA-C*12:03; TYR; ENSG00000077498; TAA
SSKDLGYDY

SEQ ID NO: 98475 - protein, 9 aa, Homo sapiens
  Table A; Target 98475; HLA-C*16:01; TYR; ENSG00000077498; TAA
SSKDLGYDY

SEQ ID NO: 98476 - protein, 9 aa, Homo sapiens
  Table A; Target 98476; HLA-C*16:02; TYR; ENSG00000077498; TAA
SSKDLGYDY

SEQ ID NO: 98477 - protein, 9 aa, Homo sapiens
  Table A; Target 98477; HLA-C*16:04; TYR; ENSG00000077498; TAA
SSKDLGYDY

SEQ ID NO: 98478 - protein, 11 aa, Homo sapiens
  Table A; Target 98478; HLA-A*30:02; TYR; ENSG00000077498; TAA
SSKDLGYDYSY

SEQ ID NO: 98479 - protein, 11 aa, Homo sapiens
  Table A; Target 98479; HLA-B*57:01; TYR; ENSG00000077498; TAA
SSKDLGYDYSY

SEQ ID NO: 98480 - protein, 9 aa, Homo sapiens
  Table A; Target 98480; HLA-B*13:02; TYR; ENSG00000077498; TAA
SSMHNALHI

SEQ ID NO: 98481 - protein, 9 aa, Homo sapiens
  Table A; Target 98481; HLA-B*58:01; TYR; ENSG00000077498; TAA
SSMHNALHI

SEQ ID NO: 98482 - protein, 10 aa, Homo sapiens
  Table A; Target 98482; HLA-A*01:01; TYR; ENSG00000077498; TAA
SSMHNALHIY

SEQ ID NO: 98483 - protein, 10 aa, Homo sapiens
  Table A; Target 98483; HLA-A*30:02; TYR; ENSG00000077498; TAA
SSMHNALHIY

SEQ ID NO: 98484 - protein, 10 aa, Homo sapiens
  Table A; Target 98484; HLA-B*57:01; TYR; ENSG00000077498; TAA
SSMHNALHIY

SEQ ID NO: 98485 - protein, 10 aa, Homo sapiens
  Table A; Target 98485; HLA-C*07:01; TYR; ENSG00000077498; TAA
SSMHNALHIY

SEQ ID NO: 98486 - protein, 9 aa, Homo sapiens
  Table A; Target 98486; HLA-A*31:01; TYR; ENSG00000077498; TAA
SSWQIVCSR

SEQ ID NO: 98487 - protein, 9 aa, Homo sapiens
  Table A; Target 98487; HLA-A*33:01; TYR; ENSG00000077498; TAA
SSWQIVCSR

SEQ ID NO: 98488 - protein, 9 aa, Homo sapiens
  Table A; Target 98488; HLA-A*33:03; TYR; ENSG00000077498; TAA
SSWQIVCSR

SEQ ID NO: 98489 - protein, 8 aa, Homo sapiens
  Table A; Target 98489; HLA-C*01:02; TYR; ENSG00000077498; TAA
STPMFNDI

SEQ ID NO: 98490 - protein, 10 aa, Homo sapiens
  Table A; Target 98490; HLA-A*68:02; TYR; ENSG00000077498; TAA
STPMFNDINI

SEQ ID NO: 98491 - protein, 11 aa, Homo sapiens
  Table A; Target 98491; HLA-A*01:01; TYR; ENSG00000077498; TAA
STPMFNDINIY

SEQ ID NO: 98492 - protein, 11 aa, Homo sapiens
  Table A; Target 98492; HLA-A*26:01; TYR; ENSG00000077498; TAA
STPMFNDINIY

SEQ ID NO: 98493 - protein, 8 aa, Homo sapiens
  Table A; Target 98493; HLA-C*14:02; TYR; ENSG00000077498; TAA
SWLLGAAM

SEQ ID NO: 98494 - protein, 9 aa, Homo sapiens
  Table A; Target 98494; HLA-A*31:01; TYR; ENSG00000077498; TAA
SWPSVFYNR

SEQ ID NO: 98495 - protein, 8 aa, Homo sapiens
  Table A; Target 98495; HLA-A*33:03; TYR; ENSG00000077498; TAA
SYLEQASR

SEQ ID NO: 98496 - protein, 9 aa, Homo sapiens
  Table A; Target 98496; HLA-A*23:01; TYR; ENSG00000077498; TAA
SYLEQASRI

SEQ ID NO: 98497 - protein, 9 aa, Homo sapiens
  Table A; Target 98497; HLA-A*24:02; TYR; ENSG00000077498; TAA
SYLEQASRI

SEQ ID NO: 98498 - protein, 9 aa, Homo sapiens
  Table A; Target 98498; HLA-C*04:01; TYR; ENSG00000077498; TAA
SYLEQASRI

SEQ ID NO: 98499 - protein, 9 aa, Homo sapiens
  Table A; Target 98499; HLA-C*14:02; TYR; ENSG00000077498; TAA
SYLEQASRI

SEQ ID NO: 98500 - protein, 10 aa, Homo sapiens
  Table A; Target 98500; HLA-A*24:02; TYR; ENSG00000077498; TAA
SYLEQASRIW

SEQ ID NO: 98501 - protein, 11 aa, Homo sapiens
  Table A; Target 98501; HLA-A*23:01; TYR; ENSG00000077498; TAA
SYLQDSDPDSF

SEQ ID NO: 98502 - protein, 11 aa, Homo sapiens
  Table A; Target 98502; HLA-A*24:02; TYR; ENSG00000077498; TAA
SYLQDSDPDSF

SEQ ID NO: 98503 - protein, 11 aa, Homo sapiens
  Table A; Target 98503; HLA-B*38:01; TYR; ENSG00000077498; TAA
SYLQDSDPDSF

SEQ ID NO: 98504 - protein, 11 aa, Homo sapiens
  Table A; Target 98504; HLA-B*39:01; TYR; ENSG00000077498; TAA
SYLQDSDPDSF

SEQ ID NO: 98505 - protein, 11 aa, Homo sapiens
  Table A; Target 98505; HLA-C*04:01; TYR; ENSG00000077498; TAA
SYLQDSDPDSF

SEQ ID NO: 98506 - protein, 11 aa, Homo sapiens
  Table A; Target 98506; HLA-C*14:02; TYR; ENSG00000077498; TAA
SYLQDSDPDSF

SEQ ID NO: 98507 - protein, 9 aa, Homo sapiens
  Table A; Target 98507; HLA-A*24:02; TYR; ENSG00000077498; TAA
SYMVPFIPL

SEQ ID NO: 98508 - protein, 9 aa, Homo sapiens
  Table A; Target 98508; HLA-A*31:01; TYR; ENSG00000077498; TAA
SYMVPFIPL

SEQ ID NO: 98509 - protein, 10 aa, Homo sapiens
  Table A; Target 98509; HLA-A*24:02; TYR; ENSG00000077498; TAA
SYMVPFIPLY

SEQ ID NO: 98510 - protein, 10 aa, Homo sapiens
  Table A; Target 98510; HLA-A*29:02; TYR; ENSG00000077498; TAA
SYMVPFIPLY

SEQ ID NO: 98511 - protein, 10 aa, Homo sapiens
  Table A; Target 98511; HLA-A*30:02; TYR; ENSG00000077498; TAA
SYMVPFIPLY

SEQ ID NO: 98512 - protein, 11 aa, Homo sapiens
  Table A; Target 98512; HLA-A*31:01; TYR; ENSG00000077498; TAA
SYMVPFIPLYR

SEQ ID NO: 98513 - protein, 8 aa, Homo sapiens
  Table A; Target 98513; HLA-B*51:01; TYR; ENSG00000077498; TAA
TALLAGLV

SEQ ID NO: 98514 - protein, 8 aa, Homo sapiens
  Table A; Target 98514; HLA-C*06:02; TYR; ENSG00000077498; TAA
TALLAGLV

SEQ ID NO: 98515 - protein, 10 aa, Homo sapiens
  Table A; Target 98515; HLA-A*23:01; TYR; ENSG00000077498; TAA
TALLAGLVSL

SEQ ID NO: 98516 - protein, 10 aa, Homo sapiens
  Table A; Target 98516; HLA-B*07:02; TYR; ENSG00000077498; TAA
TALLAGLVSL

SEQ ID NO: 98517 - protein, 10 aa, Homo sapiens
  Table A; Target 98517; HLA-B*08:01; TYR; ENSG00000077498; TAA
TALLAGLVSL

SEQ ID NO: 98518 - protein, 10 aa, Homo sapiens
  Table A; Target 98518; HLA-B*35:03; TYR; ENSG00000077498; TAA
TALLAGLVSL

SEQ ID NO: 98519 - protein, 10 aa, Homo sapiens
  Table A; Target 98519; HLA-B*40:02; TYR; ENSG00000077498; TAA
TALLAGLVSL

SEQ ID NO: 98520 - protein, 10 aa, Homo sapiens
  Table A; Target 98520; HLA-C*01:02; TYR; ENSG00000077498; TAA
TALLAGLVSL

SEQ ID NO: 98521 - protein, 10 aa, Homo sapiens
  Table A; Target 98521; HLA-C*03:03; TYR; ENSG00000077498; TAA
TALLAGLVSL

SEQ ID NO: 98522 - protein, 10 aa, Homo sapiens
  Table A; Target 98522; HLA-C*03:04; TYR; ENSG00000077498; TAA
TALLAGLVSL

SEQ ID NO: 98523 - protein, 10 aa, Homo sapiens
  Table A; Target 98523; HLA-C*05:01; TYR; ENSG00000077498; TAA
TALLAGLVSL

SEQ ID NO: 98524 - protein, 8 aa, Homo sapiens
  Table A; Target 98524; HLA-C*05:01; TYR; ENSG00000077498; TAA
TGDENFTI

SEQ ID NO: 98525 - protein, 10 aa, Homo sapiens
  Table A; Target 98525; HLA-A*01:01; TYR; ENSG00000077498; TAA
TGDENFTIPY

SEQ ID NO: 98526 - protein, 11 aa, Homo sapiens
  Table A; Target 98526; HLA-C*03:03; TYR; ENSG00000077498; TAA
TGIADASQSSM

SEQ ID NO: 98527 - protein, 11 aa, Homo sapiens
  Table A; Target 98527; HLA-C*03:04; TYR; ENSG00000077498; TAA
TGIADASQSSM

SEQ ID NO: 98528 - protein, 11 aa, Homo sapiens
  Table A; Target 98528; HLA-C*04:01; TYR; ENSG00000077498; TAA
TGIADASQSSM

SEQ ID NO: 98529 - protein, 9 aa, Homo sapiens
  Table A; Target 98529; HLA-A*25:01; TYR; ENSG00000077498; TAA
TGVDDRESW

SEQ ID NO: 98530 - protein, 9 aa, Homo sapiens
  Table A; Target 98530; HLA-A*32:01; TYR; ENSG00000077498; TAA
TGVDDRESW

SEQ ID NO: 98531 - protein, 9 aa, Homo sapiens
  Table A; Target 98531; HLA-B*57:01; TYR; ENSG00000077498; TAA
TGVDDRESW

SEQ ID NO: 98532 - protein, 9 aa, Homo sapiens
  Table A; Target 98532; HLA-B*58:01; TYR; ENSG00000077498; TAA
TGVDDRESW

SEQ ID NO: 98533 - protein, 9 aa, Homo sapiens
  Table A; Target 98533; HLA-C*16:01; TYR; ENSG00000077498; TAA
TGVDDRESW

SEQ ID NO: 98534 - protein, 8 aa, Homo sapiens
  Table A; Target 98534; HLA-B*38:01; TYR; ENSG00000077498; TAA
TISSDYVI

SEQ ID NO: 98535 - protein, 11 aa, Homo sapiens
  Table A; Target 98535; HLA-A*30:02; TYR; ENSG00000077498; TAA
TLAKHTISSDY

SEQ ID NO: 98536 - protein, 11 aa, Homo sapiens
  Table A; Target 98536; HLA-B*15:01; TYR; ENSG00000077498; TAA
TLAKHTISSDY

SEQ ID NO: 98537 - protein, 9 aa, Homo sapiens
  Table A; Target 98537; HLA-C*01:02; TYR; ENSG00000077498; TAA
TLEGFASPL

SEQ ID NO: 98538 - protein, 9 aa, Homo sapiens
  Table A; Target 98538; HLA-C*06:02; TYR; ENSG00000077498; TAA
TLEGFASPL

SEQ ID NO: 98539 - protein, 9 aa, Homo sapiens
  Table A; Target 98539; HLA-C*12:03; TYR; ENSG00000077498; TAA
TLEGFASPL

SEQ ID NO: 98540 - protein, 8 aa, Homo sapiens
  Table A; Target 98540; HLA-A*68:01; TYR; ENSG00000077498; TAA
TPEGPLRR

SEQ ID NO: 98541 - protein, 9 aa, Homo sapiens
  Table A; Target 98541; HLA-B*35:03; TYR; ENSG00000077498; TAA
TPMFNDINI

SEQ ID NO: 98542 - protein, 9 aa, Homo sapiens
  Table A; Target 98542; HLA-B*51:01; TYR; ENSG00000077498; TAA
TPMFNDINI

SEQ ID NO: 98543 - protein, 9 aa, Homo sapiens
  Table A; Target 98543; HLA-B*54:01; TYR; ENSG00000077498; TAA
TPMFNDINI

SEQ ID NO: 98544 - protein, 9 aa, Homo sapiens
  Table A; Target 98544; HLA-B*56:01; TYR; ENSG00000077498; TAA
TPMFNDINI

SEQ ID NO: 98545 - protein, 9 aa, Homo sapiens
  Table A; Target 98545; HLA-C*07:02; TYR; ENSG00000077498; TAA
TPMFNDINI

SEQ ID NO: 98546 - protein, 10 aa, Homo sapiens
  Table A; Target 98546; HLA-B*35:01; TYR; ENSG00000077498; TAA
TPMFNDINIY

SEQ ID NO: 98547 - protein, 10 aa, Homo sapiens
  Table A; Target 98547; HLA-B*55:01; TYR; ENSG00000077498; TAA
TPMFNDINIY

SEQ ID NO: 98548 - protein, 10 aa, Homo sapiens
  Table A; Target 98548; HLA-C*03:03; TYR; ENSG00000077498; TAA
TPMFNDINIY

SEQ ID NO: 98549 - protein, 8 aa, Homo sapiens
  Table A; Target 98549; HLA-B*07:02; TYR; ENSG00000077498; TAA
TPRLPSSA

SEQ ID NO: 98550 - protein, 8 aa, Homo sapiens
  Table A; Target 98550; HLA-B*54:01; TYR; ENSG00000077498; TAA
TPRLPSSA

SEQ ID NO: 98551 - protein, 8 aa, Homo sapiens
  Table A; Target 98551; HLA-B*55:01; TYR; ENSG00000077498; TAA
TPRLPSSA

SEQ ID NO: 98552 - protein, 8 aa, Homo sapiens
  Table A; Target 98552; HLA-B*56:01; TYR; ENSG00000077498; TAA
TPRLPSSA

SEQ ID NO: 98553 - protein, 10 aa, Homo sapiens
  Table A; Target 98553; HLA-B*07:02; TYR; ENSG00000077498; TAA
TPRLPSSADV

SEQ ID NO: 98554 - protein, 10 aa, Homo sapiens
  Table A; Target 98554; HLA-B*56:01; TYR; ENSG00000077498; TAA
TPRLPSSADV

SEQ ID NO: 98555 - protein, 10 aa, Homo sapiens
  Table A; Target 98555; HLA-C*07:02; TYR; ENSG00000077498; TAA
TPRLPSSADV

SEQ ID NO: 98556 - protein, 8 aa, Homo sapiens
  Table A; Target 98556; HLA-B*13:02; TYR; ENSG00000077498; TAA
TQYESGSM

SEQ ID NO: 98557 - protein, 8 aa, Homo sapiens
  Table A; Target 98557; HLA-B*15:01; TYR; ENSG00000077498; TAA
TQYESGSM

SEQ ID NO: 98558 - protein, 8 aa, Homo sapiens
  Table A; Target 98558; HLA-B*15:03; TYR; ENSG00000077498; TAA
TQYESGSM

SEQ ID NO: 98559 - protein, 8 aa, Homo sapiens
  Table A; Target 98559; HLA-B*27:05; TYR; ENSG00000077498; TAA
TQYESGSM

SEQ ID NO: 98560 - protein, 8 aa, Homo sapiens
  Table A; Target 98560; HLA-B*39:01; TYR; ENSG00000077498; TAA
TQYESGSM

SEQ ID NO: 98561 - protein, 8 aa, Homo sapiens
  Table A; Target 98561; HLA-B*40:02; TYR; ENSG00000077498; TAA
TQYESGSM

SEQ ID NO: 98562 - protein, 8 aa, Homo sapiens
  Table A; Target 98562; HLA-B*46:01; TYR; ENSG00000077498; TAA
TQYESGSM

SEQ ID NO: 98563 - protein, 8 aa, Homo sapiens
  Table A; Target 98563; HLA-C*03:03; TYR; ENSG00000077498; TAA
TQYESGSM

SEQ ID NO: 98564 - protein, 8 aa, Homo sapiens
  Table A; Target 98564; HLA-C*03:04; TYR; ENSG00000077498; TAA
TQYESGSM

SEQ ID NO: 98565 - protein, 8 aa, Homo sapiens
  Table A; Target 98565; HLA-C*04:01; TYR; ENSG00000077498; TAA
TQYESGSM

SEQ ID NO: 98566 - protein, 8 aa, Homo sapiens
  Table A; Target 98566; HLA-C*05:01; TYR; ENSG00000077498; TAA
TQYESGSM

SEQ ID NO: 98567 - protein, 8 aa, Homo sapiens
  Table A; Target 98567; HLA-C*06:02; TYR; ENSG00000077498; TAA
TQYESGSM

SEQ ID NO: 98568 - protein, 8 aa, Homo sapiens
  Table A; Target 98568; HLA-C*12:03; TYR; ENSG00000077498; TAA
TQYESGSM

SEQ ID NO: 98569 - protein, 8 aa, Homo sapiens
  Table A; Target 98569; HLA-C*14:02; TYR; ENSG00000077498; TAA
TQYESGSM

SEQ ID NO: 98570 - protein, 10 aa, Homo sapiens
  Table A; Target 98570; HLA-A*03:01; TYR; ENSG00000077498; TAA
TQYESGSMDK

SEQ ID NO: 98571 - protein, 10 aa, Homo sapiens
  Table A; Target 98571; HLA-A*03:02; TYR; ENSG00000077498; TAA
TQYESGSMDK

SEQ ID NO: 98572 - protein, 10 aa, Homo sapiens
  Table A; Target 98572; HLA-A*11:01; TYR; ENSG00000077498; TAA
TQYESGSMDK

SEQ ID NO: 98573 - protein, 10 aa, Homo sapiens
  Table A; Target 98573; HLA-A*68:01; TYR; ENSG00000077498; TAA
TQYESGSMDK

SEQ ID NO: 98574 - protein, 10 aa, Homo sapiens
  Table A; Target 98574; HLA-B*13:02; TYR; ENSG00000077498; TAA
TQYESGSMDK

SEQ ID NO: 98575 - protein, 10 aa, Homo sapiens
  Table A; Target 98575; HLA-B*27:02; TYR; ENSG00000077498; TAA
TQYESGSMDK

SEQ ID NO: 98576 - protein, 10 aa, Homo sapiens
  Table A; Target 98576; HLA-B*27:05; TYR; ENSG00000077498; TAA
TQYESGSMDK

SEQ ID NO: 98577 - protein, 10 aa, Homo sapiens
  Table A; Target 98577; HLA-B*39:01; TYR; ENSG00000077498; TAA
TQYESGSMDK

SEQ ID NO: 98578 - protein, 10 aa, Homo sapiens
  Table A; Target 98578; HLA-C*03:03; TYR; ENSG00000077498; TAA
TQYESGSMDK

SEQ ID NO: 98579 - protein, 10 aa, Homo sapiens
  Table A; Target 98579; HLA-C*04:01; TYR; ENSG00000077498; TAA
TQYESGSMDK

SEQ ID NO: 98580 - protein, 10 aa, Homo sapiens
  Table A; Target 98580; HLA-C*06:02; TYR; ENSG00000077498; TAA
TQYESGSMDK

SEQ ID NO: 98581 - protein, 10 aa, Homo sapiens
  Table A; Target 98581; HLA-C*07:01; TYR; ENSG00000077498; TAA
TQYESGSMDK

SEQ ID NO: 98582 - protein, 10 aa, Homo sapiens
  Table A; Target 98582; HLA-C*07:04; TYR; ENSG00000077498; TAA
TQYESGSMDK

SEQ ID NO: 98583 - protein, 10 aa, Homo sapiens
  Table A; Target 98583; HLA-C*07:06; TYR; ENSG00000077498; TAA
TQYESGSMDK

SEQ ID NO: 98584 - protein, 11 aa, Homo sapiens
  Table A; Target 98584; HLA-B*27:05; TYR; ENSG00000077498; TAA
TQYESGSMDKA

SEQ ID NO: 98585 - protein, 11 aa, Homo sapiens
  Table A; Target 98585; HLA-B*38:01; TYR; ENSG00000077498; TAA
TQYESGSMDKA

SEQ ID NO: 98586 - protein, 11 aa, Homo sapiens
  Table A; Target 98586; HLA-B*39:01; TYR; ENSG00000077498; TAA
TQYESGSMDKA

SEQ ID NO: 98587 - protein, 11 aa, Homo sapiens
  Table A; Target 98587; HLA-C*06:02; TYR; ENSG00000077498; TAA
TQYESGSMDKA

SEQ ID NO: 98588 - protein, 8 aa, Homo sapiens
  Table A; Target 98588; HLA-A*31:01; TYR; ENSG00000077498; TAA
TSAGHFPR

SEQ ID NO: 98589 - protein, 8 aa, Homo sapiens
  Table A; Target 98589; HLA-A*33:01; TYR; ENSG00000077498; TAA
TSAGHFPR

SEQ ID NO: 98590 - protein, 8 aa, Homo sapiens
  Table A; Target 98590; HLA-A*33:03; TYR; ENSG00000077498; TAA
TSAGHFPR

SEQ ID NO: 98591 - protein, 8 aa, Homo sapiens
  Table A; Target 98591; HLA-A*68:01; TYR; ENSG00000077498; TAA
TSAGHFPR

SEQ ID NO: 98592 - protein, 9 aa, Homo sapiens
  Table A; Target 98592; HLA-B*54:01; TYR; ENSG00000077498; TAA
TSAGHFPRA

SEQ ID NO: 98593 - protein, 9 aa, Homo sapiens
  Table A; Target 98593; HLA-C*06:02; TYR; ENSG00000077498; TAA
TSAGHFPRA

SEQ ID NO: 98594 - protein, 9 aa, Homo sapiens
  Table A; Target 98594; HLA-C*12:03; TYR; ENSG00000077498; TAA
TSAGHFPRA

SEQ ID NO: 98595 - protein, 9 aa, Homo sapiens
  Table A; Target 98595; HLA-C*16:01; TYR; ENSG00000077498; TAA
TSAGHFPRA

SEQ ID NO: 98596 - protein, 8 aa, Homo sapiens
  Table A; Target 98596; HLA-B*18:01; TYR; ENSG00000077498; TAA
VDSIFEQW

SEQ ID NO: 98597 - protein, 8 aa, Homo sapiens
  Table A; Target 98597; HLA-B*37:01; TYR; ENSG00000077498; TAA
VDSIFEQW

SEQ ID NO: 98598 - protein, 8 aa, Homo sapiens
  Table A; Target 98598; HLA-B*44:02; TYR; ENSG00000077498; TAA
VDSIFEQW

SEQ ID NO: 98599 - protein, 8 aa, Homo sapiens
  Table A; Target 98599; HLA-B*44:03; TYR; ENSG00000077498; TAA
VDSIFEQW

SEQ ID NO: 98600 - protein, 10 aa, Homo sapiens
  Table A; Target 98600; HLA-B*18:01; TYR; ENSG00000077498; TAA
VEFCLSLTQY

SEQ ID NO: 98601 - protein, 10 aa, Homo sapiens
  Table A; Target 98601; HLA-B*44:02; TYR; ENSG00000077498; TAA
VEFCLSLTQY

SEQ ID NO: 98602 - protein, 10 aa, Homo sapiens
  Table A; Target 98602; HLA-B*44:03; TYR; ENSG00000077498; TAA
VEFCLSLTQY

SEQ ID NO: 98603 - protein, 10 aa, Homo sapiens
  Table A; Target 98603; HLA-C*16:04; TYR; ENSG00000077498; TAA
VEFCLSLTQY

SEQ ID NO: 98604 - protein, 8 aa, Homo sapiens
  Table A; Target 98604; HLA-B*08:01; TYR; ENSG00000077498; TAA
VGAVLTAL

SEQ ID NO: 98605 - protein, 8 aa, Homo sapiens
  Table A; Target 98605; HLA-B*15:01; TYR; ENSG00000077498; TAA
VGAVLTAL

SEQ ID NO: 98606 - protein, 8 aa, Homo sapiens
  Table A; Target 98606; HLA-B*15:03; TYR; ENSG00000077498; TAA
VGAVLTAL

SEQ ID NO: 98607 - protein, 8 aa, Homo sapiens
  Table A; Target 98607; HLA-B*40:01; TYR; ENSG00000077498; TAA
VGAVLTAL

SEQ ID NO: 98608 - protein, 8 aa, Homo sapiens
  Table A; Target 98608; HLA-B*40:02; TYR; ENSG00000077498; TAA
VGAVLTAL

SEQ ID NO: 98609 - protein, 8 aa, Homo sapiens
  Table A; Target 98609; HLA-B*46:01; TYR; ENSG00000077498; TAA
VGAVLTAL

SEQ ID NO: 98610 - protein, 8 aa, Homo sapiens
  Table A; Target 98610; HLA-B*51:01; TYR; ENSG00000077498; TAA
VGAVLTAL

SEQ ID NO: 98611 - protein, 8 aa, Homo sapiens
  Table A; Target 98611; HLA-C*01:02; TYR; ENSG00000077498; TAA
VGAVLTAL

SEQ ID NO: 98612 - protein, 8 aa, Homo sapiens
  Table A; Target 98612; HLA-C*03:03; TYR; ENSG00000077498; TAA
VGAVLTAL

SEQ ID NO: 98613 - protein, 8 aa, Homo sapiens
  Table A; Target 98613; HLA-C*03:04; TYR; ENSG00000077498; TAA
VGAVLTAL

SEQ ID NO: 98614 - protein, 8 aa, Homo sapiens
  Table A; Target 98614; HLA-C*14:02; TYR; ENSG00000077498; TAA
VGAVLTAL

SEQ ID NO: 98615 - protein, 8 aa, Homo sapiens
  Table A; Target 98615; HLA-C*16:01; TYR; ENSG00000077498; TAA
VGAVLTAL

SEQ ID NO: 98616 - protein, 9 aa, Homo sapiens
  Table A; Target 98616; HLA-A*23:01; TYR; ENSG00000077498; TAA
VGAVLTALL

SEQ ID NO: 98617 - protein, 9 aa, Homo sapiens
  Table A; Target 98617; HLA-A*24:02; TYR; ENSG00000077498; TAA
VGAVLTALL

SEQ ID NO: 98618 - protein, 9 aa, Homo sapiens
  Table A; Target 98618; HLA-B*46:01; TYR; ENSG00000077498; TAA
VGAVLTALL

SEQ ID NO: 98619 - protein, 9 aa, Homo sapiens
  Table A; Target 98619; HLA-C*01:02; TYR; ENSG00000077498; TAA
VGAVLTALL

SEQ ID NO: 98620 - protein, 9 aa, Homo sapiens
  Table A; Target 98620; HLA-C*04:01; TYR; ENSG00000077498; TAA
VGAVLTALL

SEQ ID NO: 98621 - protein, 9 aa, Homo sapiens
  Table A; Target 98621; HLA-C*06:02; TYR; ENSG00000077498; TAA
VGAVLTALL

SEQ ID NO: 98622 - protein, 9 aa, Homo sapiens
  Table A; Target 98622; HLA-C*07:01; TYR; ENSG00000077498; TAA
VGAVLTALL

SEQ ID NO: 98623 - protein, 9 aa, Homo sapiens
  Table A; Target 98623; HLA-C*07:02; TYR; ENSG00000077498; TAA
VGAVLTALL

SEQ ID NO: 98624 - protein, 9 aa, Homo sapiens
  Table A; Target 98624; HLA-C*07:04; TYR; ENSG00000077498; TAA
VGAVLTALL

SEQ ID NO: 98625 - protein, 9 aa, Homo sapiens
  Table A; Target 98625; HLA-C*14:02; TYR; ENSG00000077498; TAA
VGAVLTALL

SEQ ID NO: 98626 - protein, 10 aa, Homo sapiens
  Table A; Target 98626; HLA-A*26:01; TYR; ENSG00000077498; TAA
VIPIGTYGQM

SEQ ID NO: 98627 - protein, 10 aa, Homo sapiens
  Table A; Target 98627; HLA-C*01:02; TYR; ENSG00000077498; TAA
VIPIGTYGQM

SEQ ID NO: 98628 - protein, 10 aa, Homo sapiens
  Table A; Target 98628; HLA-C*04:01; TYR; ENSG00000077498; TAA
VIPIGTYGQM

SEQ ID NO: 98629 - protein, 11 aa, Homo sapiens
  Table A; Target 98629; HLA-A*03:02; TYR; ENSG00000077498; TAA
VIPIGTYGQMK

SEQ ID NO: 98630 - protein, 11 aa, Homo sapiens
  Table A; Target 98630; HLA-A*11:01; TYR; ENSG00000077498; TAA
VIPIGTYGQMK

SEQ ID NO: 98631 - protein, 11 aa, Homo sapiens
  Table A; Target 98631; HLA-C*07:02; TYR; ENSG00000077498; TAA
VIPIGTYGQMK

SEQ ID NO: 98632 - protein, 9 aa, Homo sapiens
  Table A; Target 98632; HLA-A*02:01; TYR; ENSG00000077498; TAA
VLTALLAGL

SEQ ID NO: 98633 - protein, 9 aa, Homo sapiens
  Table A; Target 98633; HLA-A*02:03; TYR; ENSG00000077498; TAA
VLTALLAGL

SEQ ID NO: 98634 - protein, 9 aa, Homo sapiens
  Table A; Target 98634; HLA-A*02:04; TYR; ENSG00000077498; TAA
VLTALLAGL

SEQ ID NO: 98635 - protein, 9 aa, Homo sapiens
  Table A; Target 98635; HLA-A*02:07; TYR; ENSG00000077498; TAA
VLTALLAGL

SEQ ID NO: 98636 - protein, 9 aa, Homo sapiens
  Table A; Target 98636; HLA-B*55:01; TYR; ENSG00000077498; TAA
VLTALLAGL

SEQ ID NO: 98637 - protein, 10 aa, Homo sapiens
  Table A; Target 98637; HLA-A*02:03; TYR; ENSG00000077498; TAA
VLTALLAGLV

SEQ ID NO: 98638 - protein, 8 aa, Homo sapiens
  Table A; Target 98638; HLA-B*51:01; TYR; ENSG00000077498; TAA
VPFIPLYR

SEQ ID NO: 98639 - protein, 8 aa, Homo sapiens
  Table A; Target 98639; HLA-B*54:01; TYR; ENSG00000077498; TAA
VPFIPLYR

SEQ ID NO: 98640 - protein, 10 aa, Homo sapiens
  Table A; Target 98640; HLA-B*38:01; TYR; ENSG00000077498; TAA
VQGSANDPIF

SEQ ID NO: 98641 - protein, 9 aa, Homo sapiens
  Table A; Target 98641; HLA-A*03:01; TYR; ENSG00000077498; TAA
VSSKNLMEK

SEQ ID NO: 98642 - protein, 9 aa, Homo sapiens
  Table A; Target 98642; HLA-A*03:02; TYR; ENSG00000077498; TAA
VSSKNLMEK

SEQ ID NO: 98643 - protein, 9 aa, Homo sapiens
  Table A; Target 98643; HLA-A*11:01; TYR; ENSG00000077498; TAA
VSSKNLMEK

SEQ ID NO: 98644 - protein, 9 aa, Homo sapiens
  Table A; Target 98644; HLA-A*24:02; TYR; ENSG00000077498; TAA
VWMHYYVSM

SEQ ID NO: 98645 - protein, 8 aa, Homo sapiens
  Table A; Target 98645; HLA-C*01:02; TYR; ENSG00000077498; TAA
VYPEANAP

SEQ ID NO: 98646 - protein, 8 aa, Homo sapiens
  Table A; Target 98646; HLA-C*14:02; TYR; ENSG00000077498; TAA
VYPEANAP

SEQ ID NO: 98647 - protein, 9 aa, Homo sapiens
  Table A; Target 98647; HLA-A*23:01; TYR; ENSG00000077498; TAA
VYPEANAPI

SEQ ID NO: 98648 - protein, 9 aa, Homo sapiens
  Table A; Target 98648; HLA-A*24:02; TYR; ENSG00000077498; TAA
VYPEANAPI

SEQ ID NO: 98649 - protein, 9 aa, Homo sapiens
  Table A; Target 98649; HLA-C*01:02; TYR; ENSG00000077498; TAA
VYPEANAPI

SEQ ID NO: 98650 - protein, 9 aa, Homo sapiens
  Table A; Target 98650; HLA-C*04:01; TYR; ENSG00000077498; TAA
VYPEANAPI

SEQ ID NO: 98651 - protein, 9 aa, Homo sapiens
  Table A; Target 98651; HLA-C*07:02; TYR; ENSG00000077498; TAA
VYPEANAPI

SEQ ID NO: 98652 - protein, 9 aa, Homo sapiens
  Table A; Target 98652; HLA-C*14:02; TYR; ENSG00000077498; TAA
VYPEANAPI

SEQ ID NO: 98653 - protein, 10 aa, Homo sapiens
  Table A; Target 98653; HLA-A*24:02; TYR; ENSG00000077498; TAA
VYPEANAPIG

SEQ ID NO: 98654 - protein, 11 aa, Homo sapiens
  Table A; Target 98654; HLA-C*01:02; TYR; ENSG00000077498; TAA
VYPEANAPIGH

SEQ ID NO: 98655 - protein, 8 aa, Homo sapiens
  Table A; Target 98655; HLA-A*30:01; TYR; ENSG00000077498; TAA
WEQEIQKL

SEQ ID NO: 98656 - protein, 8 aa, Homo sapiens
  Table A; Target 98656; HLA-B*18:01; TYR; ENSG00000077498; TAA
WEQEIQKL

SEQ ID NO: 98657 - protein, 8 aa, Homo sapiens
  Table A; Target 98657; HLA-B*37:01; TYR; ENSG00000077498; TAA
WEQEIQKL

SEQ ID NO: 98658 - protein, 8 aa, Homo sapiens
  Table A; Target 98658; HLA-B*40:01; TYR; ENSG00000077498; TAA
WEQEIQKL

SEQ ID NO: 98659 - protein, 8 aa, Homo sapiens
  Table A; Target 98659; HLA-B*40:02; TYR; ENSG00000077498; TAA
WEQEIQKL

SEQ ID NO: 98660 - protein, 8 aa, Homo sapiens
  Table A; Target 98660; HLA-B*44:02; TYR; ENSG00000077498; TAA
WEQEIQKL

SEQ ID NO: 98661 - protein, 8 aa, Homo sapiens
  Table A; Target 98661; HLA-B*44:03; TYR; ENSG00000077498; TAA
WEQEIQKL

SEQ ID NO: 98662 - protein, 8 aa, Homo sapiens
  Table A; Target 98662; HLA-B*49:01; TYR; ENSG00000077498; TAA
WEQEIQKL

SEQ ID NO: 98663 - protein, 8 aa, Homo sapiens
  Table A; Target 98663; HLA-C*12:03; TYR; ENSG00000077498; TAA
WEQEIQKL

SEQ ID NO: 98664 - protein, 9 aa, Homo sapiens
  Table A; Target 98664; HLA-A*29:02; TYR; ENSG00000077498; TAA
YDLFVWMHY

SEQ ID NO: 98665 - protein, 8 aa, Homo sapiens
  Table A; Target 98665; HLA-B*27:02; TYR; ENSG00000077498; TAA
YESGSMDK

SEQ ID NO: 98666 - protein, 8 aa, Homo sapiens
  Table A; Target 98666; HLA-C*06:02; TYR; ENSG00000077498; TAA
YESGSMDK

SEQ ID NO: 98667 - protein, 8 aa, Homo sapiens
  Table A; Target 98667; HLA-C*07:01; TYR; ENSG00000077498; TAA
YESGSMDK

SEQ ID NO: 98668 - protein, 8 aa, Homo sapiens
  Table A; Target 98668; HLA-C*07:04; TYR; ENSG00000077498; TAA
YESGSMDK

SEQ ID NO: 98669 - protein, 9 aa, Homo sapiens
  Table A; Target 98669; HLA-A*30:01; TYR; ENSG00000077498; TAA
YESGSMDKA

SEQ ID NO: 98670 - protein, 9 aa, Homo sapiens
  Table A; Target 98670; HLA-B*18:01; TYR; ENSG00000077498; TAA
YESGSMDKA

SEQ ID NO: 98671 - protein, 9 aa, Homo sapiens
  Table A; Target 98671; HLA-B*27:05; TYR; ENSG00000077498; TAA
YESGSMDKA

SEQ ID NO: 98672 - protein, 9 aa, Homo sapiens
  Table A; Target 98672; HLA-B*40:01; TYR; ENSG00000077498; TAA
YESGSMDKA

SEQ ID NO: 98673 - protein, 9 aa, Homo sapiens
  Table A; Target 98673; HLA-B*40:02; TYR; ENSG00000077498; TAA
YESGSMDKA

SEQ ID NO: 98674 - protein, 9 aa, Homo sapiens
  Table A; Target 98674; HLA-B*49:01; TYR; ENSG00000077498; TAA
YESGSMDKA

SEQ ID NO: 98675 - protein, 9 aa, Homo sapiens
  Table A; Target 98675; HLA-C*06:02; TYR; ENSG00000077498; TAA
YESGSMDKA

SEQ ID NO: 98676 - protein, 9 aa, Homo sapiens
  Table A; Target 98676; HLA-C*12:03; TYR; ENSG00000077498; TAA
YESGSMDKA

SEQ ID NO: 98677 - protein, 10 aa, Homo sapiens
  Table A; Target 98677; HLA-A*30:01; TYR; ENSG00000077498; TAA
YESGSMDKAA

SEQ ID NO: 98678 - protein, 10 aa, Homo sapiens
  Table A; Target 98678; HLA-B*40:02; TYR; ENSG00000077498; TAA
YESGSMDKAA

SEQ ID NO: 98679 - protein, 10 aa, Homo sapiens
  Table A; Target 98679; HLA-B*49:01; TYR; ENSG00000077498; TAA
YESGSMDKAA

SEQ ID NO: 98680 - protein, 9 aa, Homo sapiens
  Table A; Target 98680; HLA-C*07:04; TYR; ENSG00000077498; TAA
YGQMKNGST

SEQ ID NO: 98681 - protein, 11 aa, Homo sapiens
  Table A; Target 98681; HLA-C*04:01; TYR; ENSG00000077498; TAA
YGQMKNGSTPM

SEQ ID NO: 98682 - protein, 9 aa, Homo sapiens
  Table A; Target 98682; HLA-A*68:02; TYR; ENSG00000077498; TAA
YHSLYQSHL

SEQ ID NO: 98683 - protein, 9 aa, Homo sapiens
  Table A; Target 98683; HLA-B*27:05; TYR; ENSG00000077498; TAA
YHSLYQSHL

SEQ ID NO: 98684 - protein, 9 aa, Homo sapiens
  Table A; Target 98684; HLA-B*38:01; TYR; ENSG00000077498; TAA
YHSLYQSHL

SEQ ID NO: 98685 - protein, 9 aa, Homo sapiens
  Table A; Target 98685; HLA-B*39:01; TYR; ENSG00000077498; TAA
YHSLYQSHL

SEQ ID NO: 98686 - protein, 9 aa, Homo sapiens
  Table A; Target 98686; HLA-C*07:01; TYR; ENSG00000077498; TAA
YHSLYQSHL

SEQ ID NO: 98687 - protein, 9 aa, Homo sapiens
  Table A; Target 98687; HLA-A*02:01; TYR; ENSG00000077498; TAA
YIKSYLEQA

SEQ ID NO: 98688 - protein, 9 aa, Homo sapiens
  Table A; Target 98688; HLA-A*02:03; TYR; ENSG00000077498; TAA
YIKSYLEQA

SEQ ID NO: 98689 - protein, 9 aa, Homo sapiens
  Table A; Target 98689; HLA-A*02:04; TYR; ENSG00000077498; TAA
YIKSYLEQA

SEQ ID NO: 98690 - protein, 9 aa, Homo sapiens
  Table A; Target 98690; HLA-A*02:07; TYR; ENSG00000077498; TAA
YIKSYLEQA

SEQ ID NO: 98691 - protein, 9 aa, Homo sapiens
  Table A; Target 98691; HLA-B*40:02; TYR; ENSG00000077498; TAA
YIKSYLEQA

SEQ ID NO: 98692 - protein, 9 aa, Homo sapiens
  Table A; Target 98692; HLA-B*46:01; TYR; ENSG00000077498; TAA
YIKSYLEQA

SEQ ID NO: 98693 - protein, 9 aa, Homo sapiens
  Table A; Target 98693; HLA-B*54:01; TYR; ENSG00000077498; TAA
YIKSYLEQA

SEQ ID NO: 98694 - protein, 9 aa, Homo sapiens
  Table A; Target 98694; HLA-B*55:01; TYR; ENSG00000077498; TAA
YIKSYLEQA

SEQ ID NO: 98695 - protein, 10 aa, Homo sapiens
  Table A; Target 98695; HLA-C*07:02; TYR; ENSG00000077498; TAA
YIKSYLEQAS

SEQ ID NO: 98696 - protein, 10 aa, Homo sapiens
  Table A; Target 98696; HLA-A*02:07; TYR; ENSG00000077498; TAA
YLQDSDPDSF

SEQ ID NO: 98697 - protein, 10 aa, Homo sapiens
  Table A; Target 98697; HLA-A*23:01; TYR; ENSG00000077498; TAA
YLQDSDPDSF

SEQ ID NO: 98698 - protein, 10 aa, Homo sapiens
  Table A; Target 98698; HLA-A*24:02; TYR; ENSG00000077498; TAA
YLQDSDPDSF

SEQ ID NO: 98699 - protein, 10 aa, Homo sapiens
  Table A; Target 98699; HLA-A*25:01; TYR; ENSG00000077498; TAA
YLQDSDPDSF

SEQ ID NO: 98700 - protein, 10 aa, Homo sapiens
  Table A; Target 98700; HLA-B*15:01; TYR; ENSG00000077498; TAA
YLQDSDPDSF

SEQ ID NO: 98701 - protein, 10 aa, Homo sapiens
  Table A; Target 98701; HLA-B*27:02; TYR; ENSG00000077498; TAA
YLQDSDPDSF

SEQ ID NO: 98702 - protein, 10 aa, Homo sapiens
  Table A; Target 98702; HLA-B*27:05; TYR; ENSG00000077498; TAA
YLQDSDPDSF

SEQ ID NO: 98703 - protein, 10 aa, Homo sapiens
  Table A; Target 98703; HLA-B*35:01; TYR; ENSG00000077498; TAA
YLQDSDPDSF

SEQ ID NO: 98704 - protein, 10 aa, Homo sapiens
  Table A; Target 98704; HLA-B*38:01; TYR; ENSG00000077498; TAA
YLQDSDPDSF

SEQ ID NO: 98705 - protein, 10 aa, Homo sapiens
  Table A; Target 98705; HLA-B*39:01; TYR; ENSG00000077498; TAA
YLQDSDPDSF

SEQ ID NO: 98706 - protein, 10 aa, Homo sapiens
  Table A; Target 98706; HLA-B*46:01; TYR; ENSG00000077498; TAA
YLQDSDPDSF

SEQ ID NO: 98707 - protein, 10 aa, Homo sapiens
  Table A; Target 98707; HLA-B*55:01; TYR; ENSG00000077498; TAA
YLQDSDPDSF

SEQ ID NO: 98708 - protein, 10 aa, Homo sapiens
  Table A; Target 98708; HLA-C*05:01; TYR; ENSG00000077498; TAA
YLQDSDPDSF

SEQ ID NO: 98709 - protein, 10 aa, Homo sapiens
  Table A; Target 98709; HLA-C*07:01; TYR; ENSG00000077498; TAA
YLQDSDPDSF

SEQ ID NO: 98710 - protein, 10 aa, Homo sapiens
  Table A; Target 98710; HLA-C*07:04; TYR; ENSG00000077498; TAA
YLQDSDPDSF

SEQ ID NO: 98711 - protein, 10 aa, Homo sapiens
  Table A; Target 98711; HLA-C*12:03; TYR; ENSG00000077498; TAA
YLQDSDPDSF

SEQ ID NO: 98712 - protein, 10 aa, Homo sapiens
  Table A; Target 98712; HLA-C*14:02; TYR; ENSG00000077498; TAA
YLQDSDPDSF

SEQ ID NO: 98713 - protein, 9 aa, Homo sapiens
  Table A; Target 98713; HLA-A*02:01; TYR; ENSG00000077498; TAA
YLTLAKHTI

SEQ ID NO: 98714 - protein, 9 aa, Homo sapiens
  Table A; Target 98714; HLA-A*02:03; TYR; ENSG00000077498; TAA
YLTLAKHTI

SEQ ID NO: 98715 - protein, 9 aa, Homo sapiens
  Table A; Target 98715; HLA-A*02:04; TYR; ENSG00000077498; TAA
YLTLAKHTI

SEQ ID NO: 98716 - protein, 9 aa, Homo sapiens
  Table A; Target 98716; HLA-A*24:02; TYR; ENSG00000077498; TAA
YLTLAKHTI

SEQ ID NO: 98717 - protein, 9 aa, Homo sapiens
  Table A; Target 98717; HLA-A*68:02; TYR; ENSG00000077498; TAA
YLTLAKHTI

SEQ ID NO: 98718 - protein, 9 aa, Homo sapiens
  Table A; Target 98718; HLA-B*08:01; TYR; ENSG00000077498; TAA
YLTLAKHTI

SEQ ID NO: 98719 - protein, 9 aa, Homo sapiens
  Table A; Target 98719; HLA-B*13:02; TYR; ENSG00000077498; TAA
YLTLAKHTI

SEQ ID NO: 98720 - protein, 9 aa, Homo sapiens
  Table A; Target 98720; HLA-B*55:01; TYR; ENSG00000077498; TAA
YLTLAKHTI

SEQ ID NO: 98721 - protein, 9 aa, Homo sapiens
  Table A; Target 98721; HLA-C*16:02; TYR; ENSG00000077498; TAA
YLTLAKHTI

SEQ ID NO: 98722 - protein, 8 aa, Homo sapiens
  Table A; Target 98722; HLA-C*07:04; TYR; ENSG00000077498; TAA
YMGGQHPT

SEQ ID NO: 98723 - protein, 10 aa, Homo sapiens
  Table A; Target 98723; HLA-A*02:03; TYR; ENSG00000077498; TAA
YMGGQHPTNP

SEQ ID NO: 98724 - protein, 9 aa, Homo sapiens
  Table A; Target 98724; HLA-A*01:01; TYR; ENSG00000077498; TAA
YMNGTMSQV

SEQ ID NO: 98725 - protein, 9 aa, Homo sapiens
  Table A; Target 98725; HLA-A*02:01; TYR; ENSG00000077498; TAA
YMNGTMSQV

SEQ ID NO: 98726 - protein, 9 aa, Homo sapiens
  Table A; Target 98726; HLA-A*02:03; TYR; ENSG00000077498; TAA
YMNGTMSQV

SEQ ID NO: 98727 - protein, 9 aa, Homo sapiens
  Table A; Target 98727; HLA-A*02:04; TYR; ENSG00000077498; TAA
YMNGTMSQV

SEQ ID NO: 98728 - protein, 9 aa, Homo sapiens
  Table A; Target 98728; HLA-A*02:07; TYR; ENSG00000077498; TAA
YMNGTMSQV

SEQ ID NO: 98729 - protein, 9 aa, Homo sapiens
  Table A; Target 98729; HLA-A*26:01; TYR; ENSG00000077498; TAA
YMNGTMSQV

SEQ ID NO: 98730 - protein, 9 aa, Homo sapiens
  Table A; Target 98730; HLA-A*30:01; TYR; ENSG00000077498; TAA
YMNGTMSQV

SEQ ID NO: 98731 - protein, 9 aa, Homo sapiens
  Table A; Target 98731; HLA-A*31:01; TYR; ENSG00000077498; TAA
YMNGTMSQV

SEQ ID NO: 98732 - protein, 9 aa, Homo sapiens
  Table A; Target 98732; HLA-A*32:01; TYR; ENSG00000077498; TAA
YMNGTMSQV

SEQ ID NO: 98733 - protein, 9 aa, Homo sapiens
  Table A; Target 98733; HLA-A*68:02; TYR; ENSG00000077498; TAA
YMNGTMSQV

SEQ ID NO: 98734 - protein, 9 aa, Homo sapiens
  Table A; Target 98734; HLA-B*08:01; TYR; ENSG00000077498; TAA
YMNGTMSQV

SEQ ID NO: 98735 - protein, 9 aa, Homo sapiens
  Table A; Target 98735; HLA-B*13:02; TYR; ENSG00000077498; TAA
YMNGTMSQV

SEQ ID NO: 98736 - protein, 9 aa, Homo sapiens
  Table A; Target 98736; HLA-B*15:01; TYR; ENSG00000077498; TAA
YMNGTMSQV

SEQ ID NO: 98737 - protein, 9 aa, Homo sapiens
  Table A; Target 98737; HLA-B*15:03; TYR; ENSG00000077498; TAA
YMNGTMSQV

SEQ ID NO: 98738 - protein, 9 aa, Homo sapiens
  Table A; Target 98738; HLA-B*27:05; TYR; ENSG00000077498; TAA
YMNGTMSQV

SEQ ID NO: 98739 - protein, 9 aa, Homo sapiens
  Table A; Target 98739; HLA-B*38:01; TYR; ENSG00000077498; TAA
YMNGTMSQV

SEQ ID NO: 98740 - protein, 9 aa, Homo sapiens
  Table A; Target 98740; HLA-B*39:01; TYR; ENSG00000077498; TAA
YMNGTMSQV

SEQ ID NO: 98741 - protein, 9 aa, Homo sapiens
  Table A; Target 98741; HLA-B*40:02; TYR; ENSG00000077498; TAA
YMNGTMSQV

SEQ ID NO: 98742 - protein, 9 aa, Homo sapiens
  Table A; Target 98742; HLA-B*46:01; TYR; ENSG00000077498; TAA
YMNGTMSQV

SEQ ID NO: 98743 - protein, 9 aa, Homo sapiens
  Table A; Target 98743; HLA-B*49:01; TYR; ENSG00000077498; TAA
YMNGTMSQV

SEQ ID NO: 98744 - protein, 9 aa, Homo sapiens
  Table A; Target 98744; HLA-B*51:01; TYR; ENSG00000077498; TAA
YMNGTMSQV

SEQ ID NO: 98745 - protein, 9 aa, Homo sapiens
  Table A; Target 98745; HLA-B*54:01; TYR; ENSG00000077498; TAA
YMNGTMSQV

SEQ ID NO: 98746 - protein, 9 aa, Homo sapiens
  Table A; Target 98746; HLA-B*55:01; TYR; ENSG00000077498; TAA
YMNGTMSQV

SEQ ID NO: 98747 - protein, 9 aa, Homo sapiens
  Table A; Target 98747; HLA-B*56:01; TYR; ENSG00000077498; TAA
YMNGTMSQV

SEQ ID NO: 98748 - protein, 9 aa, Homo sapiens
  Table A; Target 98748; HLA-B*58:01; TYR; ENSG00000077498; TAA
YMNGTMSQV

SEQ ID NO: 98749 - protein, 9 aa, Homo sapiens
  Table A; Target 98749; HLA-C*01:02; TYR; ENSG00000077498; TAA
YMNGTMSQV

SEQ ID NO: 98750 - protein, 9 aa, Homo sapiens
  Table A; Target 98750; HLA-C*02:02; TYR; ENSG00000077498; TAA
YMNGTMSQV

SEQ ID NO: 98751 - protein, 9 aa, Homo sapiens
  Table A; Target 98751; HLA-C*03:03; TYR; ENSG00000077498; TAA
YMNGTMSQV

SEQ ID NO: 98752 - protein, 9 aa, Homo sapiens
  Table A; Target 98752; HLA-C*03:04; TYR; ENSG00000077498; TAA
YMNGTMSQV

SEQ ID NO: 98753 - protein, 9 aa, Homo sapiens
  Table A; Target 98753; HLA-C*04:01; TYR; ENSG00000077498; TAA
YMNGTMSQV

SEQ ID NO: 98754 - protein, 9 aa, Homo sapiens
  Table A; Target 98754; HLA-C*05:01; TYR; ENSG00000077498; TAA
YMNGTMSQV

SEQ ID NO: 98755 - protein, 9 aa, Homo sapiens
  Table A; Target 98755; HLA-C*06:02; TYR; ENSG00000077498; TAA
YMNGTMSQV

SEQ ID NO: 98756 - protein, 9 aa, Homo sapiens
  Table A; Target 98756; HLA-C*07:04; TYR; ENSG00000077498; TAA
YMNGTMSQV

SEQ ID NO: 98757 - protein, 9 aa, Homo sapiens
  Table A; Target 98757; HLA-C*12:03; TYR; ENSG00000077498; TAA
YMNGTMSQV

SEQ ID NO: 98758 - protein, 9 aa, Homo sapiens
  Table A; Target 98758; HLA-C*14:02; TYR; ENSG00000077498; TAA
YMNGTMSQV

SEQ ID NO: 98759 - protein, 9 aa, Homo sapiens
  Table A; Target 98759; HLA-C*16:02; TYR; ENSG00000077498; TAA
YMNGTMSQV

SEQ ID NO: 98760 - protein, 9 aa, Homo sapiens
  Table A; Target 98760; HLA-C*16:04; TYR; ENSG00000077498; TAA
YMNGTMSQV

SEQ ID NO: 98761 - protein, 10 aa, Homo sapiens
  Table A; Target 98761; HLA-C*04:01; TYR; ENSG00000077498; TAA
YMNGTMSQVQ

SEQ ID NO: 98762 - protein, 10 aa, Homo sapiens
  Table A; Target 98762; HLA-C*07:01; TYR; ENSG00000077498; TAA
YMNGTMSQVQ

SEQ ID NO: 98763 - protein, 11 aa, Homo sapiens
  Table A; Target 98763; HLA-C*04:01; TYR; ENSG00000077498; TAA
YMNGTMSQVQG

SEQ ID NO: 98764 - protein, 9 aa, Homo sapiens
  Table A; Target 98764; HLA-A*01:01; TYR; ENSG00000077498; TAA
YMVPFIPLY

SEQ ID NO: 98765 - protein, 9 aa, Homo sapiens
  Table A; Target 98765; HLA-A*02:01; TYR; ENSG00000077498; TAA
YMVPFIPLY

SEQ ID NO: 98766 - protein, 9 aa, Homo sapiens
  Table A; Target 98766; HLA-A*02:03; TYR; ENSG00000077498; TAA
YMVPFIPLY

SEQ ID NO: 98767 - protein, 9 aa, Homo sapiens
  Table A; Target 98767; HLA-A*02:04; TYR; ENSG00000077498; TAA
YMVPFIPLY

SEQ ID NO: 98768 - protein, 9 aa, Homo sapiens
  Table A; Target 98768; HLA-A*02:07; TYR; ENSG00000077498; TAA
YMVPFIPLY

SEQ ID NO: 98769 - protein, 9 aa, Homo sapiens
  Table A; Target 98769; HLA-A*23:01; TYR; ENSG00000077498; TAA
YMVPFIPLY

SEQ ID NO: 98770 - protein, 9 aa, Homo sapiens
  Table A; Target 98770; HLA-A*24:02; TYR; ENSG00000077498; TAA
YMVPFIPLY

SEQ ID NO: 98771 - protein, 9 aa, Homo sapiens
  Table A; Target 98771; HLA-A*25:01; TYR; ENSG00000077498; TAA
YMVPFIPLY

SEQ ID NO: 98772 - protein, 9 aa, Homo sapiens
  Table A; Target 98772; HLA-A*26:01; TYR; ENSG00000077498; TAA
YMVPFIPLY

SEQ ID NO: 98773 - protein, 9 aa, Homo sapiens
  Table A; Target 98773; HLA-A*29:02; TYR; ENSG00000077498; TAA
YMVPFIPLY

SEQ ID NO: 98774 - protein, 9 aa, Homo sapiens
  Table A; Target 98774; HLA-B*15:03; TYR; ENSG00000077498; TAA
YMVPFIPLY

SEQ ID NO: 98775 - protein, 9 aa, Homo sapiens
  Table A; Target 98775; HLA-B*35:01; TYR; ENSG00000077498; TAA
YMVPFIPLY

SEQ ID NO: 98776 - protein, 9 aa, Homo sapiens
  Table A; Target 98776; HLA-B*44:02; TYR; ENSG00000077498; TAA
YMVPFIPLY

SEQ ID NO: 98777 - protein, 9 aa, Homo sapiens
  Table A; Target 98777; HLA-B*46:01; TYR; ENSG00000077498; TAA
YMVPFIPLY

SEQ ID NO: 98778 - protein, 9 aa, Homo sapiens
  Table A; Target 98778; HLA-B*54:01; TYR; ENSG00000077498; TAA
YMVPFIPLY

SEQ ID NO: 98779 - protein, 9 aa, Homo sapiens
  Table A; Target 98779; HLA-B*57:01; TYR; ENSG00000077498; TAA
YMVPFIPLY

SEQ ID NO: 98780 - protein, 9 aa, Homo sapiens
  Table A; Target 98780; HLA-C*02:02; TYR; ENSG00000077498; TAA
YMVPFIPLY

SEQ ID NO: 98781 - protein, 9 aa, Homo sapiens
  Table A; Target 98781; HLA-C*07:01; TYR; ENSG00000077498; TAA
YMVPFIPLY

SEQ ID NO: 98782 - protein, 9 aa, Homo sapiens
  Table A; Target 98782; HLA-C*12:03; TYR; ENSG00000077498; TAA
YMVPFIPLY

SEQ ID NO: 98783 - protein, 9 aa, Homo sapiens
  Table A; Target 98783; HLA-C*16:04; TYR; ENSG00000077498; TAA
YMVPFIPLY

SEQ ID NO: 98784 - protein, 10 aa, Homo sapiens
  Table A; Target 98784; HLA-A*02:03; TYR; ENSG00000077498; TAA
YMVPFIPLYR

SEQ ID NO: 98785 - protein, 10 aa, Homo sapiens
  Table A; Target 98785; HLA-A*29:02; TYR; ENSG00000077498; TAA
YMVPFIPLYR

SEQ ID NO: 98786 - protein, 10 aa, Homo sapiens
  Table A; Target 98786; HLA-A*31:01; TYR; ENSG00000077498; TAA
YMVPFIPLYR

SEQ ID NO: 98787 - protein, 9 aa, Homo sapiens
  Table A; Target 98787; HLA-B*35:01; TYR; ENSG00000077498; TAA
YPEANAPIG

SEQ ID NO: 98788 - protein, 9 aa, Homo sapiens
  Table A; Target 98788; HLA-B*35:03; TYR; ENSG00000077498; TAA
YPEANAPIG

SEQ ID NO: 98789 - protein, 10 aa, Homo sapiens
  Table A; Target 98789; HLA-B*27:02; TYR; ENSG00000077498; TAA
YPEANAPIGH

SEQ ID NO: 98790 - protein, 10 aa, Homo sapiens
  Table A; Target 98790; HLA-B*35:01; TYR; ENSG00000077498; TAA
YPEANAPIGH

SEQ ID NO: 98791 - protein, 10 aa, Homo sapiens
  Table A; Target 98791; HLA-B*55:01; TYR; ENSG00000077498; TAA
YPEANAPIGH

SEQ ID NO: 98792 - protein, 10 aa, Homo sapiens
  Table A; Target 98792; HLA-C*07:01; TYR; ENSG00000077498; TAA
YPEANAPIGH

SEQ ID NO: 98793 - protein, 8 aa, Homo sapiens
  Table A; Target 98793; HLA-A*23:01; TYR; ENSG00000077498; TAA
YVIPIGTY

SEQ ID NO: 98794 - protein, 8 aa, Homo sapiens
  Table A; Target 98794; HLA-A*25:01; TYR; ENSG00000077498; TAA
YVIPIGTY

SEQ ID NO: 98795 - protein, 8 aa, Homo sapiens
  Table A; Target 98795; HLA-A*26:01; TYR; ENSG00000077498; TAA
YVIPIGTY

SEQ ID NO: 98796 - protein, 8 aa, Homo sapiens
  Table A; Target 98796; HLA-A*29:02; TYR; ENSG00000077498; TAA
YVIPIGTY

SEQ ID NO: 98797 - protein, 8 aa, Homo sapiens
  Table A; Target 98797; HLA-A*30:02; TYR; ENSG00000077498; TAA
YVIPIGTY

SEQ ID NO: 98798 - protein, 8 aa, Homo sapiens
  Table A; Target 98798; HLA-A*32:01; TYR; ENSG00000077498; TAA
YVIPIGTY

SEQ ID NO: 98799 - protein, 8 aa, Homo sapiens
  Table A; Target 98799; HLA-B*15:01; TYR; ENSG00000077498; TAA
YVIPIGTY

SEQ ID NO: 98800 - protein, 8 aa, Homo sapiens
  Table A; Target 98800; HLA-B*15:03; TYR; ENSG00000077498; TAA
YVIPIGTY

SEQ ID NO: 98801 - protein, 8 aa, Homo sapiens
  Table A; Target 98801; HLA-B*18:01; TYR; ENSG00000077498; TAA
YVIPIGTY

SEQ ID NO: 98802 - protein, 8 aa, Homo sapiens
  Table A; Target 98802; HLA-B*27:05; TYR; ENSG00000077498; TAA
YVIPIGTY

SEQ ID NO: 98803 - protein, 8 aa, Homo sapiens
  Table A; Target 98803; HLA-B*35:01; TYR; ENSG00000077498; TAA
YVIPIGTY

SEQ ID NO: 98804 - protein, 8 aa, Homo sapiens
  Table A; Target 98804; HLA-B*39:01; TYR; ENSG00000077498; TAA
YVIPIGTY

SEQ ID NO: 98805 - protein, 8 aa, Homo sapiens
  Table A; Target 98805; HLA-B*40:02; TYR; ENSG00000077498; TAA
YVIPIGTY

SEQ ID NO: 98806 - protein, 8 aa, Homo sapiens
  Table A; Target 98806; HLA-B*46:01; TYR; ENSG00000077498; TAA
YVIPIGTY

SEQ ID NO: 98807 - protein, 8 aa, Homo sapiens
  Table A; Target 98807; HLA-B*57:01; TYR; ENSG00000077498; TAA
YVIPIGTY

SEQ ID NO: 98808 - protein, 8 aa, Homo sapiens
  Table A; Target 98808; HLA-B*58:01; TYR; ENSG00000077498; TAA
YVIPIGTY

SEQ ID NO: 98809 - protein, 8 aa, Homo sapiens
  Table A; Target 98809; HLA-C*02:02; TYR; ENSG00000077498; TAA
YVIPIGTY

SEQ ID NO: 98810 - protein, 8 aa, Homo sapiens
  Table A; Target 98810; HLA-C*03:03; TYR; ENSG00000077498; TAA
YVIPIGTY

SEQ ID NO: 98811 - protein, 8 aa, Homo sapiens
  Table A; Target 98811; HLA-C*04:01; TYR; ENSG00000077498; TAA
YVIPIGTY

SEQ ID NO: 98812 - protein, 8 aa, Homo sapiens
  Table A; Target 98812; HLA-C*07:01; TYR; ENSG00000077498; TAA
YVIPIGTY

SEQ ID NO: 98813 - protein, 8 aa, Homo sapiens
  Table A; Target 98813; HLA-C*07:04; TYR; ENSG00000077498; TAA
YVIPIGTY

SEQ ID NO: 98814 - protein, 8 aa, Homo sapiens
  Table A; Target 98814; HLA-C*12:03; TYR; ENSG00000077498; TAA
YVIPIGTY

SEQ ID NO: 98815 - protein, 8 aa, Homo sapiens
  Table A; Target 98815; HLA-C*14:02; TYR; ENSG00000077498; TAA
YVIPIGTY

SEQ ID NO: 98816 - protein, 8 aa, Homo sapiens
  Table A; Target 98816; HLA-C*16:02; TYR; ENSG00000077498; TAA
YVIPIGTY

SEQ ID NO: 98817 - protein, 8 aa, Homo sapiens
  Table A; Target 98817; HLA-C*16:04; TYR; ENSG00000077498; TAA
YVIPIGTY

SEQ ID NO: 98818 - protein, 9 aa, Homo sapiens
  Table A; Target 98818; HLA-A*26:01; TYR; ENSG00000077498; TAA
YVIPIGTYG

SEQ ID NO: 98819 - protein, 9 aa, Homo sapiens
  Table A; Target 98819; HLA-A*68:02; TYR; ENSG00000077498; TAA
YVIPIGTYG

SEQ ID NO: 98820 - protein, 9 aa, Homo sapiens
  Table A; Target 98820; HLA-B*27:05; TYR; ENSG00000077498; TAA
YVIPIGTYG

SEQ ID NO: 98821 - protein, 9 aa, Homo sapiens
  Table A; Target 98821; HLA-C*04:01; TYR; ENSG00000077498; TAA
YVIPIGTYG

SEQ ID NO: 98822 - protein, 10 aa, Homo sapiens
  Table A; Target 98822; HLA-A*02:07; TYR; ENSG00000077498; TAA
YVIPIGTYGQ

SEQ ID NO: 98823 - protein, 10 aa, Homo sapiens
  Table A; Target 98823; HLA-A*26:01; TYR; ENSG00000077498; TAA
YVIPIGTYGQ

SEQ ID NO: 98824 - protein, 10 aa, Homo sapiens
  Table A; Target 98824; HLA-A*68:02; TYR; ENSG00000077498; TAA
YVIPIGTYGQ

SEQ ID NO: 98825 - protein, 11 aa, Homo sapiens
  Table A; Target 98825; HLA-A*02:07; TYR; ENSG00000077498; TAA
YVIPIGTYGQM

SEQ ID NO: 98826 - protein, 11 aa, Homo sapiens
  Table A; Target 98826; HLA-A*25:01; TYR; ENSG00000077498; TAA
YVIPIGTYGQM

SEQ ID NO: 98827 - protein, 11 aa, Homo sapiens
  Table A; Target 98827; HLA-A*26:01; TYR; ENSG00000077498; TAA
YVIPIGTYGQM

SEQ ID NO: 98828 - protein, 11 aa, Homo sapiens
  Table A; Target 98828; HLA-A*29:02; TYR; ENSG00000077498; TAA
YVIPIGTYGQM

SEQ ID NO: 98829 - protein, 11 aa, Homo sapiens
  Table A; Target 98829; HLA-A*68:02; TYR; ENSG00000077498; TAA
YVIPIGTYGQM

SEQ ID NO: 98830 - protein, 11 aa, Homo sapiens
  Table A; Target 98830; HLA-B*35:01; TYR; ENSG00000077498; TAA
YVIPIGTYGQM

SEQ ID NO: 98831 - protein, 11 aa, Homo sapiens
  Table A; Target 98831; HLA-C*04:01; TYR; ENSG00000077498; TAA
YVIPIGTYGQM

SEQ ID NO: 98832 - protein, 8 aa, Homo sapiens
  Table A; Target 98832; HLA-B*35:03; TYR; ENSG00000077498; TAA
YVSMDALL

SEQ ID NO: 98833 - protein, 8 aa, Homo sapiens
  Table A; Target 98833; HLA-C*07:04; TYR; ENSG00000077498; TAA
YVSMDALL

SEQ ID NO: 98834 - protein, 8 aa, Homo sapiens
  Table A; Target 98834; HLA-A*23:01; TYR; ENSG00000077498; TAA
YYVSMDAL

SEQ ID NO: 98835 - protein, 8 aa, Homo sapiens
  Table A; Target 98835; HLA-A*24:02; TYR; ENSG00000077498; TAA
YYVSMDAL

SEQ ID NO: 98836 - protein, 8 aa, Homo sapiens
  Table A; Target 98836; HLA-B*39:01; TYR; ENSG00000077498; TAA
YYVSMDAL

SEQ ID NO: 98837 - protein, 8 aa, Homo sapiens
  Table A; Target 98837; HLA-B*40:02; TYR; ENSG00000077498; TAA
YYVSMDAL

SEQ ID NO: 98838 - protein, 8 aa, Homo sapiens
  Table A; Target 98838; HLA-C*01:02; TYR; ENSG00000077498; TAA
YYVSMDAL

SEQ ID NO: 98839 - protein, 8 aa, Homo sapiens
  Table A; Target 98839; HLA-C*03:03; TYR; ENSG00000077498; TAA
YYVSMDAL

SEQ ID NO: 98840 - protein, 8 aa, Homo sapiens
  Table A; Target 98840; HLA-C*03:04; TYR; ENSG00000077498; TAA
YYVSMDAL

SEQ ID NO: 98841 - protein, 8 aa, Homo sapiens
  Table A; Target 98841; HLA-C*04:01; TYR; ENSG00000077498; TAA
YYVSMDAL

SEQ ID NO: 98842 - protein, 8 aa, Homo sapiens
  Table A; Target 98842; HLA-C*07:02; TYR; ENSG00000077498; TAA
YYVSMDAL

SEQ ID NO: 98843 - protein, 8 aa, Homo sapiens
  Table A; Target 98843; HLA-C*14:02; TYR; ENSG00000077498; TAA
YYVSMDAL

SEQ ID NO: 98844 - protein, 9 aa, Homo sapiens
  Table A; Target 98844; HLA-A*23:01; TYR; ENSG00000077498; TAA
YYVSMDALL

SEQ ID NO: 98845 - protein, 9 aa, Homo sapiens
  Table A; Target 98845; HLA-A*24:02; TYR; ENSG00000077498; TAA
YYVSMDALL

SEQ ID NO: 98846 - protein, 9 aa, Homo sapiens
  Table A; Target 98846; HLA-C*14:02; TYR; ENSG00000077498; TAA
YYVSMDALL

SEQ ID NO: 98847 - protein, 10 aa, Homo sapiens
  Table A; Target 98847; HLA-C*07:01; TYR; ENSG00000077498; TAA
YYVSMDALLG

SEQ ID NO: 98848 - protein, 10 aa, Homo sapiens
  Table A; Target 98848; HLA-A*29:02; UGT2B11; ENSG00000213759; TAA
AAHDLTWFQY

SEQ ID NO: 98849 - protein, 10 aa, Homo sapiens
  Table A; Target 98849; HLA-A*30:02; UGT2B11; ENSG00000213759; TAA
AAHDLTWFQY

SEQ ID NO: 98850 - protein, 9 aa, Homo sapiens
  Table A; Target 98850; HLA-A*02:03; UGT2B11; ENSG00000213759; TAA
AALLNIRFV

SEQ ID NO: 98851 - protein, 9 aa, Homo sapiens
  Table A; Target 98851; HLA-A*02:04; UGT2B11; ENSG00000213759; TAA
AALLNIRFV

SEQ ID NO: 98852 - protein, 9 aa, Homo sapiens
  Table A; Target 98852; HLA-C*16:02; UGT2B11; ENSG00000213759; TAA
AALLNIRFV

SEQ ID NO: 98853 - protein, 10 aa, Homo sapiens
  Table A; Target 98853; HLA-A*29:02; UGT2B11; ENSG00000213759; TAA
AALLNIRFVY

SEQ ID NO: 98854 - protein, 10 aa, Homo sapiens
  Table A; Target 98854; HLA-A*30:02; UGT2B11; ENSG00000213759; TAA
AALLNIRFVY

SEQ ID NO: 98855 - protein, 10 aa, Homo sapiens
  Table A; Target 98855; HLA-B*57:01; UGT2B11; ENSG00000213759; TAA
AALLNIRFVY

SEQ ID NO: 98856 - protein, 10 aa, Homo sapiens
  Table A; Target 98856; HLA-B*35:01; UGT2B11; ENSG00000213759; TAA
AAVRLDFNTM

SEQ ID NO: 98857 - protein, 10 aa, Homo sapiens
  Table A; Target 98857; HLA-B*35:03; UGT2B11; ENSG00000213759; TAA
AAVRLDFNTM

SEQ ID NO: 98858 - protein, 10 aa, Homo sapiens
  Table A; Target 98858; HLA-B*58:01; UGT2B11; ENSG00000213759; TAA
AAVRLDFNTM

SEQ ID NO: 98859 - protein, 10 aa, Homo sapiens
  Table A; Target 98859; HLA-C*02:02; UGT2B11; ENSG00000213759; TAA
AAVRLDFNTM

SEQ ID NO: 98860 - protein, 10 aa, Homo sapiens
  Table A; Target 98860; HLA-C*03:03; UGT2B11; ENSG00000213759; TAA
AAVRLDFNTM

SEQ ID NO: 98861 - protein, 10 aa, Homo sapiens
  Table A; Target 98861; HLA-C*03:04; UGT2B11; ENSG00000213759; TAA
AAVRLDFNTM

SEQ ID NO: 98862 - protein, 10 aa, Homo sapiens
  Table A; Target 98862; HLA-C*12:03; UGT2B11; ENSG00000213759; TAA
AAVRLDFNTM

SEQ ID NO: 98863 - protein, 10 aa, Homo sapiens
  Table A; Target 98863; HLA-C*16:04; UGT2B11; ENSG00000213759; TAA
AAVRLDFNTM

SEQ ID NO: 98864 - protein, 9 aa, Homo sapiens
  Table A; Target 98864; HLA-B*13:02; UGT2B11; ENSG00000213759; TAA
ACVATVIFI

SEQ ID NO: 98865 - protein, 10 aa, Homo sapiens
  Table A; Target 98865; HLA-B*44:02; UGT2B11; ENSG00000213759; TAA
ADIWLMRNSW

SEQ ID NO: 98866 - protein, 9 aa, Homo sapiens
  Table A; Target 98866; HLA-A*30:01; UGT2B11; ENSG00000213759; TAA
AERANVIAT

SEQ ID NO: 98867 - protein, 9 aa, Homo sapiens
  Table A; Target 98867; HLA-B*37:01; UGT2B11; ENSG00000213759; TAA
AERANVIAT

SEQ ID NO: 98868 - protein, 9 aa, Homo sapiens
  Table A; Target 98868; HLA-B*40:01; UGT2B11; ENSG00000213759; TAA
AERANVIAT

SEQ ID NO: 98869 - protein, 9 aa, Homo sapiens
  Table A; Target 98869; HLA-B*40:02; UGT2B11; ENSG00000213759; TAA
AERANVIAT

SEQ ID NO: 98870 - protein, 9 aa, Homo sapiens
  Table A; Target 98870; HLA-B*49:01; UGT2B11; ENSG00000213759; TAA
AERANVIAT

SEQ ID NO: 98871 - protein, 10 aa, Homo sapiens
  Table A; Target 98871; HLA-A*30:01; UGT2B11; ENSG00000213759; TAA
AERANVIATA

SEQ ID NO: 98872 - protein, 10 aa, Homo sapiens
  Table A; Target 98872; HLA-B*40:02; UGT2B11; ENSG00000213759; TAA
AERANVIATA

SEQ ID NO: 98873 - protein, 10 aa, Homo sapiens
  Table A; Target 98873; HLA-B*44:02; UGT2B11; ENSG00000213759; TAA
AERANVIATA

SEQ ID NO: 98874 - protein, 10 aa, Homo sapiens
  Table A; Target 98874; HLA-B*49:01; UGT2B11; ENSG00000213759; TAA
AERANVIATA

SEQ ID NO: 98875 - protein, 10 aa, Homo sapiens
  Table A; Target 98875; HLA-B*56:01; UGT2B11; ENSG00000213759; TAA
AERANVIATA

SEQ ID NO: 98876 - protein, 11 aa, Homo sapiens
  Table A; Target 98876; HLA-A*30:01; UGT2B11; ENSG00000213759; TAA
AERANVIATAL

SEQ ID NO: 98877 - protein, 11 aa, Homo sapiens
  Table A; Target 98877; HLA-B*40:01; UGT2B11; ENSG00000213759; TAA
AERANVIATAL

SEQ ID NO: 98878 - protein, 11 aa, Homo sapiens
  Table A; Target 98878; HLA-B*40:02; UGT2B11; ENSG00000213759; TAA
AERANVIATAL

SEQ ID NO: 98879 - protein, 11 aa, Homo sapiens
  Table A; Target 98879; HLA-B*44:02; UGT2B11; ENSG00000213759; TAA
AERANVIATAL

SEQ ID NO: 98880 - protein, 11 aa, Homo sapiens
  Table A; Target 98880; HLA-B*44:03; UGT2B11; ENSG00000213759; TAA
AERANVIATAL

SEQ ID NO: 98881 - protein, 9 aa, Homo sapiens
  Table A; Target 98881; HLA-A*30:01; UGT2B11; ENSG00000213759; TAA
AEYSHWMNM

SEQ ID NO: 98882 - protein, 9 aa, Homo sapiens
  Table A; Target 98882; HLA-B*37:01; UGT2B11; ENSG00000213759; TAA
AEYSHWMNM

SEQ ID NO: 98883 - protein, 9 aa, Homo sapiens
  Table A; Target 98883; HLA-B*40:01; UGT2B11; ENSG00000213759; TAA
AEYSHWMNM

SEQ ID NO: 98884 - protein, 9 aa, Homo sapiens
  Table A; Target 98884; HLA-B*40:02; UGT2B11; ENSG00000213759; TAA
AEYSHWMNM

SEQ ID NO: 98885 - protein, 9 aa, Homo sapiens
  Table A; Target 98885; HLA-B*44:02; UGT2B11; ENSG00000213759; TAA
AEYSHWMNM

SEQ ID NO: 98886 - protein, 9 aa, Homo sapiens
  Table A; Target 98886; HLA-B*44:03; UGT2B11; ENSG00000213759; TAA
AEYSHWMNM

SEQ ID NO: 98887 - protein, 9 aa, Homo sapiens
  Table A; Target 98887; HLA-B*49:01; UGT2B11; ENSG00000213759; TAA
AEYSHWMNM

SEQ ID NO: 98888 - protein, 8 aa, Homo sapiens
  Table A; Target 98888; HLA-C*03:04; UGT2B11; ENSG00000213759; TAA
AIYHGIPM

SEQ ID NO: 98889 - protein, 9 aa, Homo sapiens
  Table A; Target 98889; HLA-A*02:01; UGT2B11; ENSG00000213759; TAA
AIYHGIPMV

SEQ ID NO: 98890 - protein, 9 aa, Homo sapiens
  Table A; Target 98890; HLA-A*02:03; UGT2B11; ENSG00000213759; TAA
AIYHGIPMV

SEQ ID NO: 98891 - protein, 9 aa, Homo sapiens
  Table A; Target 98891; HLA-A*02:04; UGT2B11; ENSG00000213759; TAA
AIYHGIPMV

SEQ ID NO: 98892 - protein, 9 aa, Homo sapiens
  Table A; Target 98892; HLA-A*02:07; UGT2B11; ENSG00000213759; TAA
AIYHGIPMV

SEQ ID NO: 98893 - protein, 9 aa, Homo sapiens
  Table A; Target 98893; HLA-B*13:02; UGT2B11; ENSG00000213759; TAA
AIYHGIPMV

SEQ ID NO: 98894 - protein, 9 aa, Homo sapiens
  Table A; Target 98894; HLA-B*55:01; UGT2B11; ENSG00000213759; TAA
AIYHGIPMV

SEQ ID NO: 98895 - protein, 9 aa, Homo sapiens
  Table A; Target 98895; HLA-C*02:02; UGT2B11; ENSG00000213759; TAA
AIYHGIPMV

SEQ ID NO: 98896 - protein, 8 aa, Homo sapiens
  Table A; Target 98896; HLA-B*15:03; UGT2B11; ENSG00000213759; TAA
AKIPQKVL

SEQ ID NO: 98897 - protein, 9 aa, Homo sapiens
  Table A; Target 98897; HLA-B*15:03; UGT2B11; ENSG00000213759; TAA
AKIPQKVLW

SEQ ID NO: 98898 - protein, 9 aa, Homo sapiens
  Table A; Target 98898; HLA-B*44:02; UGT2B11; ENSG00000213759; TAA
AKIPQKVLW

SEQ ID NO: 98899 - protein, 9 aa, Homo sapiens
  Table A; Target 98899; HLA-B*57:01; UGT2B11; ENSG00000213759; TAA
AKIPQKVLW

SEQ ID NO: 98900 - protein, 8 aa, Homo sapiens
  Table A; Target 98900; HLA-A*03:01; UGT2B11; ENSG00000213759; TAA
ALAKIPQK

SEQ ID NO: 98901 - protein, 8 aa, Homo sapiens
  Table A; Target 98901; HLA-A*03:02; UGT2B11; ENSG00000213759; TAA
ALAKIPQK

SEQ ID NO: 98902 - protein, 9 aa, Homo sapiens
  Table A; Target 98902; HLA-A*02:01; UGT2B11; ENSG00000213759; TAA
ALAKIPQKV

SEQ ID NO: 98903 - protein, 9 aa, Homo sapiens
  Table A; Target 98903; HLA-A*02:03; UGT2B11; ENSG00000213759; TAA
ALAKIPQKV

SEQ ID NO: 98904 - protein, 9 aa, Homo sapiens
  Table A; Target 98904; HLA-A*02:04; UGT2B11; ENSG00000213759; TAA
ALAKIPQKV

SEQ ID NO: 98905 - protein, 9 aa, Homo sapiens
  Table A; Target 98905; HLA-A*02:07; UGT2B11; ENSG00000213759; TAA
ALAKIPQKV

SEQ ID NO: 98906 - protein, 9 aa, Homo sapiens
  Table A; Target 98906; HLA-A*68:02; UGT2B11; ENSG00000213759; TAA
ALAKIPQKV

SEQ ID NO: 98907 - protein, 9 aa, Homo sapiens
  Table A; Target 98907; HLA-B*13:02; UGT2B11; ENSG00000213759; TAA
ALAKIPQKV

SEQ ID NO: 98908 - protein, 9 aa, Homo sapiens
  Table A; Target 98908; HLA-B*55:01; UGT2B11; ENSG00000213759; TAA
ALAKIPQKV

SEQ ID NO: 98909 - protein, 9 aa, Homo sapiens
  Table A; Target 98909; HLA-C*06:02; UGT2B11; ENSG00000213759; TAA
ALAKIPQKV

SEQ ID NO: 98910 - protein, 8 aa, Homo sapiens
  Table A; Target 98910; HLA-A*02:04; UGT2B11; ENSG00000213759; TAA
ALGLNTRL

SEQ ID NO: 98911 - protein, 9 aa, Homo sapiens
  Table A; Target 98911; HLA-A*01:01; UGT2B11; ENSG00000213759; TAA
ALGLNTRLY

SEQ ID NO: 98912 - protein, 9 aa, Homo sapiens
  Table A; Target 98912; HLA-A*03:01; UGT2B11; ENSG00000213759; TAA
ALGLNTRLY

SEQ ID NO: 98913 - protein, 9 aa, Homo sapiens
  Table A; Target 98913; HLA-A*03:02; UGT2B11; ENSG00000213759; TAA
ALGLNTRLY

SEQ ID NO: 98914 - protein, 9 aa, Homo sapiens
  Table A; Target 98914; HLA-A*29:02; UGT2B11; ENSG00000213759; TAA
ALGLNTRLY

SEQ ID NO: 98915 - protein, 9 aa, Homo sapiens
  Table A; Target 98915; HLA-A*30:02; UGT2B11; ENSG00000213759; TAA
ALGLNTRLY

SEQ ID NO: 98916 - protein, 9 aa, Homo sapiens
  Table A; Target 98916; HLA-A*32:01; UGT2B11; ENSG00000213759; TAA
ALGLNTRLY

SEQ ID NO: 98917 - protein, 9 aa, Homo sapiens
  Table A; Target 98917; HLA-B*15:01; UGT2B11; ENSG00000213759; TAA
ALGLNTRLY

SEQ ID NO: 98918 - protein, 9 aa, Homo sapiens
  Table A; Target 98918; HLA-B*15:03; UGT2B11; ENSG00000213759; TAA
ALGLNTRLY

SEQ ID NO: 98919 - protein, 9 aa, Homo sapiens
  Table A; Target 98919; HLA-C*07:04; UGT2B11; ENSG00000213759; TAA
ALGLNTRLY

SEQ ID NO: 98920 - protein, 9 aa, Homo sapiens
  Table A; Target 98920; HLA-C*16:01; UGT2B11; ENSG00000213759; TAA
ALGLNTRLY

SEQ ID NO: 98921 - protein, 10 aa, Homo sapiens
  Table A; Target 98921; HLA-A*02:03; UGT2B11; ENSG00000213759; TAA
ALKTVINDPL

SEQ ID NO: 98922 - protein, 10 aa, Homo sapiens
  Table A; Target 98922; HLA-A*02:04; UGT2B11; ENSG00000213759; TAA
ALKTVINDPL

SEQ ID NO: 98923 - protein, 10 aa, Homo sapiens
  Table A; Target 98923; HLA-A*02:07; UGT2B11; ENSG00000213759; TAA
ALKTVINDPL

SEQ ID NO: 98924 - protein, 11 aa, Homo sapiens
  Table A; Target 98924; HLA-A*01:01; UGT2B11; ENSG00000213759; TAA
ALKTVINDPLY

SEQ ID NO: 98925 - protein, 11 aa, Homo sapiens
  Table A; Target 98925; HLA-A*29:02; UGT2B11; ENSG00000213759; TAA
ALKTVINDPLY

SEQ ID NO: 98926 - protein, 11 aa, Homo sapiens
  Table A; Target 98926; HLA-A*30:02; UGT2B11; ENSG00000213759; TAA
ALKTVINDPLY

SEQ ID NO: 98927 - protein, 11 aa, Homo sapiens
  Table A; Target 98927; HLA-B*15:01; UGT2B11; ENSG00000213759; TAA
ALKTVINDPLY

SEQ ID NO: 98928 - protein, 8 aa, Homo sapiens
  Table A; Target 98928; HLA-A*02:01; UGT2B11; ENSG00000213759; TAA
ALLNIRFV

SEQ ID NO: 98929 - protein, 8 aa, Homo sapiens
  Table A; Target 98929; HLA-A*02:03; UGT2B11; ENSG00000213759; TAA
ALLNIRFV

SEQ ID NO: 98930 - protein, 8 aa, Homo sapiens
  Table A; Target 98930; HLA-A*02:04; UGT2B11; ENSG00000213759; TAA
ALLNIRFV

SEQ ID NO: 98931 - protein, 9 aa, Homo sapiens
  Table A; Target 98931; HLA-A*02:04; UGT2B11; ENSG00000213759; TAA
ALLNIRFVY

SEQ ID NO: 98932 - protein, 9 aa, Homo sapiens
  Table A; Target 98932; HLA-A*03:01; UGT2B11; ENSG00000213759; TAA
ALLNIRFVY

SEQ ID NO: 98933 - protein, 9 aa, Homo sapiens
  Table A; Target 98933; HLA-A*29:02; UGT2B11; ENSG00000213759; TAA
ALLNIRFVY

SEQ ID NO: 98934 - protein, 9 aa, Homo sapiens
  Table A; Target 98934; HLA-A*30:02; UGT2B11; ENSG00000213759; TAA
ALLNIRFVY

SEQ ID NO: 98935 - protein, 9 aa, Homo sapiens
  Table A; Target 98935; HLA-A*31:01; UGT2B11; ENSG00000213759; TAA
ALLNIRFVY

SEQ ID NO: 98936 - protein, 9 aa, Homo sapiens
  Table A; Target 98936; HLA-A*32:01; UGT2B11; ENSG00000213759; TAA
ALLNIRFVY

SEQ ID NO: 98937 - protein, 9 aa, Homo sapiens
  Table A; Target 98937; HLA-B*15:01; UGT2B11; ENSG00000213759; TAA
ALLNIRFVY

SEQ ID NO: 98938 - protein, 9 aa, Homo sapiens
  Table A; Target 98938; HLA-B*15:03; UGT2B11; ENSG00000213759; TAA
ALLNIRFVY

SEQ ID NO: 98939 - protein, 9 aa, Homo sapiens
  Table A; Target 98939; HLA-B*44:02; UGT2B11; ENSG00000213759; TAA
ALLNIRFVY

SEQ ID NO: 98940 - protein, 9 aa, Homo sapiens
  Table A; Target 98940; HLA-B*44:03; UGT2B11; ENSG00000213759; TAA
ALLNIRFVY

SEQ ID NO: 98941 - protein, 9 aa, Homo sapiens
  Table A; Target 98941; HLA-B*46:01; UGT2B11; ENSG00000213759; TAA
ALLNIRFVY

SEQ ID NO: 98942 - protein, 9 aa, Homo sapiens
  Table A; Target 98942; HLA-B*57:01; UGT2B11; ENSG00000213759; TAA
ALLNIRFVY

SEQ ID NO: 98943 - protein, 9 aa, Homo sapiens
  Table A; Target 98943; HLA-C*02:02; UGT2B11; ENSG00000213759; TAA
ALLNIRFVY

SEQ ID NO: 98944 - protein, 9 aa, Homo sapiens
  Table A; Target 98944; HLA-C*16:01; UGT2B11; ENSG00000213759; TAA
ALLNIRFVY

SEQ ID NO: 98945 - protein, 10 aa, Homo sapiens
  Table A; Target 98945; HLA-A*02:01; UGT2B11; ENSG00000213759; TAA
ALLNIRFVYS

SEQ ID NO: 98946 - protein, 10 aa, Homo sapiens
  Table A; Target 98946; HLA-A*02:04; UGT2B11; ENSG00000213759; TAA
ALLNIRFVYS

SEQ ID NO: 98947 - protein, 11 aa, Homo sapiens
  Table A; Target 98947; HLA-A*02:01; UGT2B11; ENSG00000213759; TAA
ALLNIRFVYSL

SEQ ID NO: 98948 - protein, 11 aa, Homo sapiens
  Table A; Target 98948; HLA-A*02:04; UGT2B11; ENSG00000213759; TAA
ALLNIRFVYSL

SEQ ID NO: 98949 - protein, 8 aa, Homo sapiens
  Table A; Target 98949; HLA-A*30:01; UGT2B11; ENSG00000213759; TAA
ANVIATAL

SEQ ID NO: 98950 - protein, 8 aa, Homo sapiens
  Table A; Target 98950; HLA-B*08:01; UGT2B11; ENSG00000213759; TAA
ANVIATAL

SEQ ID NO: 98951 - protein, 8 aa, Homo sapiens
  Table A; Target 98951; HLA-B*27:05; UGT2B11; ENSG00000213759; TAA
ANVIATAL

SEQ ID NO: 98952 - protein, 8 aa, Homo sapiens
  Table A; Target 98952; HLA-B*37:01; UGT2B11; ENSG00000213759; TAA
ANVIATAL

SEQ ID NO: 98953 - protein, 8 aa, Homo sapiens
  Table A; Target 98953; HLA-B*40:02; UGT2B11; ENSG00000213759; TAA
ANVIATAL

SEQ ID NO: 98954 - protein, 8 aa, Homo sapiens
  Table A; Target 98954; HLA-C*01:02; UGT2B11; ENSG00000213759; TAA
ANVIATAL

SEQ ID NO: 98955 - protein, 8 aa, Homo sapiens
  Table A; Target 98955; HLA-C*03:03; UGT2B11; ENSG00000213759; TAA
ANVIATAL

SEQ ID NO: 98956 - protein, 8 aa, Homo sapiens
  Table A; Target 98956; HLA-C*03:04; UGT2B11; ENSG00000213759; TAA
ANVIATAL

SEQ ID NO: 98957 - protein, 8 aa, Homo sapiens
  Table A; Target 98957; HLA-C*04:01; UGT2B11; ENSG00000213759; TAA
ANVIATAL

SEQ ID NO: 98958 - protein, 8 aa, Homo sapiens
  Table A; Target 98958; HLA-C*07:01; UGT2B11; ENSG00000213759; TAA
ANVIATAL

SEQ ID NO: 98959 - protein, 8 aa, Homo sapiens
  Table A; Target 98959; HLA-C*07:02; UGT2B11; ENSG00000213759; TAA
ANVIATAL

SEQ ID NO: 98960 - protein, 8 aa, Homo sapiens
  Table A; Target 98960; HLA-C*14:02; UGT2B11; ENSG00000213759; TAA
ANVIATAL

SEQ ID NO: 98961 - protein, 8 aa, Homo sapiens
  Table A; Target 98961; HLA-C*16:01; UGT2B11; ENSG00000213759; TAA
ANVIATAL

SEQ ID NO: 98962 - protein, 8 aa, Homo sapiens
  Table A; Target 98962; HLA-B*37:01; UGT2B11; ENSG00000213759; TAA
ASSASILF

SEQ ID NO: 98963 - protein, 8 aa, Homo sapiens
  Table A; Target 98963; HLA-B*58:01; UGT2B11; ENSG00000213759; TAA
ASSASILF

SEQ ID NO: 98964 - protein, 8 aa, Homo sapiens
  Table A; Target 98964; HLA-C*16:01; UGT2B11; ENSG00000213759; TAA
ASTLKFEV

SEQ ID NO: 98965 - protein, 9 aa, Homo sapiens
  Table A; Target 98965; HLA-A*01:01; UGT2B11; ENSG00000213759; TAA
ASTLKFEVY

SEQ ID NO: 98966 - protein, 9 aa, Homo sapiens
  Table A; Target 98966; HLA-A*29:02; UGT2B11; ENSG00000213759; TAA
ASTLKFEVY

SEQ ID NO: 98967 - protein, 9 aa, Homo sapiens
  Table A; Target 98967; HLA-A*30:02; UGT2B11; ENSG00000213759; TAA
ASTLKFEVY

SEQ ID NO: 98968 - protein, 9 aa, Homo sapiens
  Table A; Target 98968; HLA-A*32:01; UGT2B11; ENSG00000213759; TAA
ASTLKFEVY

SEQ ID NO: 98969 - protein, 9 aa, Homo sapiens
  Table A; Target 98969; HLA-B*15:01; UGT2B11; ENSG00000213759; TAA
ASTLKFEVY

SEQ ID NO: 98970 - protein, 9 aa, Homo sapiens
  Table A; Target 98970; HLA-B*15:03; UGT2B11; ENSG00000213759; TAA
ASTLKFEVY

SEQ ID NO: 98971 - protein, 9 aa, Homo sapiens
  Table A; Target 98971; HLA-B*46:01; UGT2B11; ENSG00000213759; TAA
ASTLKFEVY

SEQ ID NO: 98972 - protein, 9 aa, Homo sapiens
  Table A; Target 98972; HLA-B*57:01; UGT2B11; ENSG00000213759; TAA
ASTLKFEVY

SEQ ID NO: 98973 - protein, 9 aa, Homo sapiens
  Table A; Target 98973; HLA-B*58:01; UGT2B11; ENSG00000213759; TAA
ASTLKFEVY

SEQ ID NO: 98974 - protein, 9 aa, Homo sapiens
  Table A; Target 98974; HLA-C*02:02; UGT2B11; ENSG00000213759; TAA
ASTLKFEVY

SEQ ID NO: 98975 - protein, 9 aa, Homo sapiens
  Table A; Target 98975; HLA-C*16:01; UGT2B11; ENSG00000213759; TAA
ASTLKFEVY

SEQ ID NO: 98976 - protein, 10 aa, Homo sapiens
  Table A; Target 98976; HLA-A*03:01; UGT2B11; ENSG00000213759; TAA
ATALAKIPQK

SEQ ID NO: 98977 - protein, 10 aa, Homo sapiens
  Table A; Target 98977; HLA-A*03:02; UGT2B11; ENSG00000213759; TAA
ATALAKIPQK

SEQ ID NO: 98978 - protein, 10 aa, Homo sapiens
  Table A; Target 98978; HLA-A*11:01; UGT2B11; ENSG00000213759; TAA
ATALAKIPQK

SEQ ID NO: 98979 - protein, 10 aa, Homo sapiens
  Table A; Target 98979; HLA-A*68:01; UGT2B11; ENSG00000213759; TAA
ATALAKIPQK

SEQ ID NO: 98980 - protein, 11 aa, Homo sapiens
  Table A; Target 98980; HLA-A*68:02; UGT2B11; ENSG00000213759; TAA
ATALAKIPQKV

SEQ ID NO: 98981 - protein, 9 aa, Homo sapiens
  Table A; Target 98981; HLA-A*03:01; UGT2B11; ENSG00000213759; TAA
ATVIFIITK

SEQ ID NO: 98982 - protein, 9 aa, Homo sapiens
  Table A; Target 98982; HLA-A*03:02; UGT2B11; ENSG00000213759; TAA
ATVIFIITK

SEQ ID NO: 98983 - protein, 9 aa, Homo sapiens
  Table A; Target 98983; HLA-A*11:01; UGT2B11; ENSG00000213759; TAA
ATVIFIITK

SEQ ID NO: 98984 - protein, 9 aa, Homo sapiens
  Table A; Target 98984; HLA-A*31:01; UGT2B11; ENSG00000213759; TAA
ATVIFIITK

SEQ ID NO: 98985 - protein, 9 aa, Homo sapiens
  Table A; Target 98985; HLA-A*68:01; UGT2B11; ENSG00000213759; TAA
ATVIFIITK

SEQ ID NO: 98986 - protein, 9 aa, Homo sapiens
  Table A; Target 98986; HLA-B*27:02; UGT2B11; ENSG00000213759; TAA
ATVIFIITK

SEQ ID NO: 98987 - protein, 9 aa, Homo sapiens
  Table A; Target 98987; HLA-B*57:01; UGT2B11; ENSG00000213759; TAA
ATVIFIITK

SEQ ID NO: 98988 - protein, 9 aa, Homo sapiens
  Table A; Target 98988; HLA-C*07:06; UGT2B11; ENSG00000213759; TAA
ATVIFIITK

SEQ ID NO: 98989 - protein, 10 aa, Homo sapiens
  Table A; Target 98989; HLA-A*25:01; UGT2B11; ENSG00000213759; TAA
ATVIFIITKF

SEQ ID NO: 98990 - protein, 10 aa, Homo sapiens
  Table A; Target 98990; HLA-A*26:01; UGT2B11; ENSG00000213759; TAA
ATVIFIITKF

SEQ ID NO: 98991 - protein, 10 aa, Homo sapiens
  Table A; Target 98991; HLA-A*68:02; UGT2B11; ENSG00000213759; TAA
ATVIFIITKF

SEQ ID NO: 98992 - protein, 10 aa, Homo sapiens
  Table A; Target 98992; HLA-B*44:02; UGT2B11; ENSG00000213759; TAA
ATVIFIITKF

SEQ ID NO: 98993 - protein, 10 aa, Homo sapiens
  Table A; Target 98993; HLA-B*57:01; UGT2B11; ENSG00000213759; TAA
ATVIFIITKF

SEQ ID NO: 98994 - protein, 9 aa, Homo sapiens
  Table A; Target 98994; HLA-A*02:01; UGT2B11; ENSG00000213759; TAA
AVFPCGELL

SEQ ID NO: 98995 - protein, 9 aa, Homo sapiens
  Table A; Target 98995; HLA-A*02:04; UGT2B11; ENSG00000213759; TAA
AVFPCGELL

SEQ ID NO: 98996 - protein, 9 aa, Homo sapiens
  Table A; Target 98996; HLA-A*02:07; UGT2B11; ENSG00000213759; TAA
AVFPCGELL

SEQ ID NO: 98997 - protein, 9 aa, Homo sapiens
  Table A; Target 98997; HLA-A*03:02; UGT2B11; ENSG00000213759; TAA
AVFPCGELL

SEQ ID NO: 98998 - protein, 9 aa, Homo sapiens
  Table A; Target 98998; HLA-A*23:01; UGT2B11; ENSG00000213759; TAA
AVFPCGELL

SEQ ID NO: 98999 - protein, 9 aa, Homo sapiens
  Table A; Target 98999; HLA-A*24:02; UGT2B11; ENSG00000213759; TAA
AVFPCGELL

SEQ ID NO: 99000 - protein, 9 aa, Homo sapiens
  Table A; Target 99000; HLA-A*32:01; UGT2B11; ENSG00000213759; TAA
AVFPCGELL

SEQ ID NO: 99001 - protein, 9 aa, Homo sapiens
  Table A; Target 99001; HLA-A*68:02; UGT2B11; ENSG00000213759; TAA
AVFPCGELL

SEQ ID NO: 99002 - protein, 9 aa, Homo sapiens
  Table A; Target 99002; HLA-B*13:02; UGT2B11; ENSG00000213759; TAA
AVFPCGELL

SEQ ID NO: 99003 - protein, 9 aa, Homo sapiens
  Table A; Target 99003; HLA-B*15:01; UGT2B11; ENSG00000213759; TAA
AVFPCGELL

SEQ ID NO: 99004 - protein, 9 aa, Homo sapiens
  Table A; Target 99004; HLA-B*27:05; UGT2B11; ENSG00000213759; TAA
AVFPCGELL

SEQ ID NO: 99005 - protein, 9 aa, Homo sapiens
  Table A; Target 99005; HLA-B*38:01; UGT2B11; ENSG00000213759; TAA
AVFPCGELL

SEQ ID NO: 99006 - protein, 9 aa, Homo sapiens
  Table A; Target 99006; HLA-B*58:01; UGT2B11; ENSG00000213759; TAA
AVFPCGELL

SEQ ID NO: 99007 - protein, 9 aa, Homo sapiens
  Table A; Target 99007; HLA-C*02:02; UGT2B11; ENSG00000213759; TAA
AVFPCGELL

SEQ ID NO: 99008 - protein, 9 aa, Homo sapiens
  Table A; Target 99008; HLA-C*03:03; UGT2B11; ENSG00000213759; TAA
AVFPCGELL

SEQ ID NO: 99009 - protein, 9 aa, Homo sapiens
  Table A; Target 99009; HLA-C*03:04; UGT2B11; ENSG00000213759; TAA
AVFPCGELL

SEQ ID NO: 99010 - protein, 11 aa, Homo sapiens
  Table A; Target 99010; HLA-B*56:01; UGT2B11; ENSG00000213759; TAA
AVFPCGELLAA

SEQ ID NO: 99011 - protein, 9 aa, Homo sapiens
  Table A; Target 99011; HLA-A*24:02; UGT2B11; ENSG00000213759; TAA
AVRLDFNTM

SEQ ID NO: 99012 - protein, 9 aa, Homo sapiens
  Table A; Target 99012; HLA-A*31:01; UGT2B11; ENSG00000213759; TAA
AVRLDFNTM

SEQ ID NO: 99013 - protein, 9 aa, Homo sapiens
  Table A; Target 99013; HLA-A*32:01; UGT2B11; ENSG00000213759; TAA
AVRLDFNTM

SEQ ID NO: 99014 - protein, 9 aa, Homo sapiens
  Table A; Target 99014; HLA-B*07:02; UGT2B11; ENSG00000213759; TAA
AVRLDFNTM

SEQ ID NO: 99015 - protein, 9 aa, Homo sapiens
  Table A; Target 99015; HLA-B*08:01; UGT2B11; ENSG00000213759; TAA
AVRLDFNTM

SEQ ID NO: 99016 - protein, 9 aa, Homo sapiens
  Table A; Target 99016; HLA-B*15:01; UGT2B11; ENSG00000213759; TAA
AVRLDFNTM

SEQ ID NO: 99017 - protein, 9 aa, Homo sapiens
  Table A; Target 99017; HLA-B*15:03; UGT2B11; ENSG00000213759; TAA
AVRLDFNTM

SEQ ID NO: 99018 - protein, 9 aa, Homo sapiens
  Table A; Target 99018; HLA-B*37:01; UGT2B11; ENSG00000213759; TAA
AVRLDFNTM

SEQ ID NO: 99019 - protein, 9 aa, Homo sapiens
  Table A; Target 99019; HLA-B*40:02; UGT2B11; ENSG00000213759; TAA
AVRLDFNTM

SEQ ID NO: 99020 - protein, 9 aa, Homo sapiens
  Table A; Target 99020; HLA-B*46:01; UGT2B11; ENSG00000213759; TAA
AVRLDFNTM

SEQ ID NO: 99021 - protein, 9 aa, Homo sapiens
  Table A; Target 99021; HLA-B*56:01; UGT2B11; ENSG00000213759; TAA
AVRLDFNTM

SEQ ID NO: 99022 - protein, 9 aa, Homo sapiens
  Table A; Target 99022; HLA-B*57:01; UGT2B11; ENSG00000213759; TAA
AVRLDFNTM

SEQ ID NO: 99023 - protein, 9 aa, Homo sapiens
  Table A; Target 99023; HLA-C*01:02; UGT2B11; ENSG00000213759; TAA
AVRLDFNTM

SEQ ID NO: 99024 - protein, 9 aa, Homo sapiens
  Table A; Target 99024; HLA-C*06:02; UGT2B11; ENSG00000213759; TAA
AVRLDFNTM

SEQ ID NO: 99025 - protein, 9 aa, Homo sapiens
  Table A; Target 99025; HLA-C*07:02; UGT2B11; ENSG00000213759; TAA
AVRLDFNTM

SEQ ID NO: 99026 - protein, 9 aa, Homo sapiens
  Table A; Target 99026; HLA-C*07:04; UGT2B11; ENSG00000213759; TAA
AVRLDFNTM

SEQ ID NO: 99027 - protein, 9 aa, Homo sapiens
  Table A; Target 99027; HLA-C*14:02; UGT2B11; ENSG00000213759; TAA
AVRLDFNTM

SEQ ID NO: 99028 - protein, 9 aa, Homo sapiens
  Table A; Target 99028; HLA-A*68:02; UGT2B11; ENSG00000213759; TAA
CVATVIFII

SEQ ID NO: 99029 - protein, 11 aa, Homo sapiens
  Table A; Target 99029; HLA-A*11:01; UGT2B11; ENSG00000213759; TAA
CVATVIFIITK

SEQ ID NO: 99030 - protein, 8 aa, Homo sapiens
  Table A; Target 99030; HLA-A*33:01; UGT2B11; ENSG00000213759; TAA
DALGLNTR

SEQ ID NO: 99031 - protein, 8 aa, Homo sapiens
  Table A; Target 99031; HLA-A*33:03; UGT2B11; ENSG00000213759; TAA
DALGLNTR

SEQ ID NO: 99032 - protein, 8 aa, Homo sapiens
  Table A; Target 99032; HLA-B*51:01; UGT2B11; ENSG00000213759; TAA
DALGLNTR

SEQ ID NO: 99033 - protein, 9 aa, Homo sapiens
  Table A; Target 99033; HLA-A*33:01; UGT2B11; ENSG00000213759; TAA
DALGLNTRL

SEQ ID NO: 99034 - protein, 9 aa, Homo sapiens
  Table A; Target 99034; HLA-B*35:03; UGT2B11; ENSG00000213759; TAA
DALGLNTRL

SEQ ID NO: 99035 - protein, 9 aa, Homo sapiens
  Table A; Target 99035; HLA-B*51:01; UGT2B11; ENSG00000213759; TAA
DALGLNTRL

SEQ ID NO: 99036 - protein, 10 aa, Homo sapiens
  Table A; Target 99036; HLA-A*25:01; UGT2B11; ENSG00000213759; TAA
DALGLNTRLY

SEQ ID NO: 99037 - protein, 10 aa, Homo sapiens
  Table A; Target 99037; HLA-A*26:01; UGT2B11; ENSG00000213759; TAA
DALGLNTRLY

SEQ ID NO: 99038 - protein, 10 aa, Homo sapiens
  Table A; Target 99038; HLA-B*35:01; UGT2B11; ENSG00000213759; TAA
DALGLNTRLY

SEQ ID NO: 99039 - protein, 10 aa, Homo sapiens
  Table A; Target 99039; HLA-C*07:01; UGT2B11; ENSG00000213759; TAA
DALGLNTRLY

SEQ ID NO: 99040 - protein, 11 aa, Homo sapiens
  Table A; Target 99040; HLA-A*33:01; UGT2B11; ENSG00000213759; TAA
DALGLNTRLYK

SEQ ID NO: 99041 - protein, 9 aa, Homo sapiens
  Table A; Target 99041; HLA-A*33:01; UGT2B11; ENSG00000213759; TAA
DASTLKFEV

SEQ ID NO: 99042 - protein, 9 aa, Homo sapiens
  Table A; Target 99042; HLA-A*68:02; UGT2B11; ENSG00000213759; TAA
DASTLKFEV

SEQ ID NO: 99043 - protein, 9 aa, Homo sapiens
  Table A; Target 99043; HLA-B*51:01; UGT2B11; ENSG00000213759; TAA
DASTLKFEV

SEQ ID NO: 99044 - protein, 9 aa, Homo sapiens
  Table A; Target 99044; HLA-C*12:03; UGT2B11; ENSG00000213759; TAA
DASTLKFEV

SEQ ID NO: 99045 - protein, 9 aa, Homo sapiens
  Table A; Target 99045; HLA-C*16:02; UGT2B11; ENSG00000213759; TAA
DASTLKFEV

SEQ ID NO: 99046 - protein, 10 aa, Homo sapiens
  Table A; Target 99046; HLA-A*25:01; UGT2B11; ENSG00000213759; TAA
DASTLKFEVY

SEQ ID NO: 99047 - protein, 10 aa, Homo sapiens
  Table A; Target 99047; HLA-A*26:01; UGT2B11; ENSG00000213759; TAA
DASTLKFEVY

SEQ ID NO: 99048 - protein, 10 aa, Homo sapiens
  Table A; Target 99048; HLA-B*35:01; UGT2B11; ENSG00000213759; TAA
DASTLKFEVY

SEQ ID NO: 99049 - protein, 10 aa, Homo sapiens
  Table A; Target 99049; HLA-C*03:03; UGT2B11; ENSG00000213759; TAA
DASTLKFEVY

SEQ ID NO: 99050 - protein, 9 aa, Homo sapiens
  Table A; Target 99050; HLA-A*68:02; UGT2B11; ENSG00000213759; TAA
DAVFPCGEL

SEQ ID NO: 99051 - protein, 9 aa, Homo sapiens
  Table A; Target 99051; HLA-B*35:01; UGT2B11; ENSG00000213759; TAA
DAVFPCGEL

SEQ ID NO: 99052 - protein, 9 aa, Homo sapiens
  Table A; Target 99052; HLA-B*35:03; UGT2B11; ENSG00000213759; TAA
DAVFPCGEL

SEQ ID NO: 99053 - protein, 9 aa, Homo sapiens
  Table A; Target 99053; HLA-B*51:01; UGT2B11; ENSG00000213759; TAA
DAVFPCGEL

SEQ ID NO: 99054 - protein, 9 aa, Homo sapiens
  Table A; Target 99054; HLA-C*03:04; UGT2B11; ENSG00000213759; TAA
DAVFPCGEL

SEQ ID NO: 99055 - protein, 10 aa, Homo sapiens
  Table A; Target 99055; HLA-A*68:02; UGT2B11; ENSG00000213759; TAA
DAVFPCGELL

SEQ ID NO: 99056 - protein, 10 aa, Homo sapiens
  Table A; Target 99056; HLA-C*07:01; UGT2B11; ENSG00000213759; TAA
DAVFPCGELL

SEQ ID NO: 99057 - protein, 11 aa, Homo sapiens
  Table A; Target 99057; HLA-A*33:01; UGT2B11; ENSG00000213759; TAA
DFNTMSSTDLL

SEQ ID NO: 99058 - protein, 9 aa, Homo sapiens
  Table A; Target 99058; HLA-A*33:01; UGT2B11; ENSG00000213759; TAA
DFVGGFHCK

SEQ ID NO: 99059 - protein, 9 aa, Homo sapiens
  Table A; Target 99059; HLA-A*33:03; UGT2B11; ENSG00000213759; TAA
DFVGGFHCK

SEQ ID NO: 99060 - protein, 9 aa, Homo sapiens
  Table A; Target 99060; HLA-A*26:01; UGT2B11; ENSG00000213759; TAA
DIVFADAVF

SEQ ID NO: 99061 - protein, 9 aa, Homo sapiens
  Table A; Target 99061; HLA-A*33:01; UGT2B11; ENSG00000213759; TAA
DLLGHPKTR

SEQ ID NO: 99062 - protein, 9 aa, Homo sapiens
  Table A; Target 99062; HLA-A*33:03; UGT2B11; ENSG00000213759; TAA
DLLGHPKTR

SEQ ID NO: 99063 - protein, 9 aa, Homo sapiens
  Table A; Target 99063; HLA-A*02:03; UGT2B11; ENSG00000213759; TAA
DLLNALKTV

SEQ ID NO: 99064 - protein, 9 aa, Homo sapiens
  Table A; Target 99064; HLA-B*51:01; UGT2B11; ENSG00000213759; TAA
DLLNALKTV

SEQ ID NO: 99065 - protein, 8 aa, Homo sapiens
  Table A; Target 99065; HLA-B*08:01; UGT2B11; ENSG00000213759; TAA
DMKKWDQF

SEQ ID NO: 99066 - protein, 9 aa, Homo sapiens
  Table A; Target 99066; HLA-A*33:01; UGT2B11; ENSG00000213759; TAA
DNIAHMKAK

SEQ ID NO: 99067 - protein, 8 aa, Homo sapiens
  Table A; Target 99067; HLA-B*08:01; UGT2B11; ENSG00000213759; TAA
DPLYKENI

SEQ ID NO: 99068 - protein, 8 aa, Homo sapiens
  Table A; Target 99068; HLA-B*51:01; UGT2B11; ENSG00000213759; TAA
DPLYKENI

SEQ ID NO: 99069 - protein, 9 aa, Homo sapiens
  Table A; Target 99069; HLA-B*08:01; UGT2B11; ENSG00000213759; TAA
DPLYKENIM

SEQ ID NO: 99070 - protein, 9 aa, Homo sapiens
  Table A; Target 99070; HLA-B*35:01; UGT2B11; ENSG00000213759; TAA
DPLYKENIM

SEQ ID NO: 99071 - protein, 9 aa, Homo sapiens
  Table A; Target 99071; HLA-B*35:03; UGT2B11; ENSG00000213759; TAA
DPLYKENIM

SEQ ID NO: 99072 - protein, 9 aa, Homo sapiens
  Table A; Target 99072; HLA-B*51:01; UGT2B11; ENSG00000213759; TAA
DPLYKENIM

SEQ ID NO: 99073 - protein, 9 aa, Homo sapiens
  Table A; Target 99073; HLA-B*55:01; UGT2B11; ENSG00000213759; TAA
DPLYKENIM

SEQ ID NO: 99074 - protein, 9 aa, Homo sapiens
  Table A; Target 99074; HLA-C*03:03; UGT2B11; ENSG00000213759; TAA
DPLYKENIM

SEQ ID NO: 99075 - protein, 11 aa, Homo sapiens
  Table A; Target 99075; HLA-A*33:01; UGT2B11; ENSG00000213759; TAA
DPLYKENIMKL

SEQ ID NO: 99076 - protein, 8 aa, Homo sapiens
  Table A; Target 99076; HLA-B*07:02; UGT2B11; ENSG00000213759; TAA
DPNDASTL

SEQ ID NO: 99077 - protein, 8 aa, Homo sapiens
  Table A; Target 99077; HLA-B*35:01; UGT2B11; ENSG00000213759; TAA
DPNDASTL

SEQ ID NO: 99078 - protein, 8 aa, Homo sapiens
  Table A; Target 99078; HLA-B*35:03; UGT2B11; ENSG00000213759; TAA
DPNDASTL

SEQ ID NO: 99079 - protein, 8 aa, Homo sapiens
  Table A; Target 99079; HLA-B*51:01; UGT2B11; ENSG00000213759; TAA
DPNDASTL

SEQ ID NO: 99080 - protein, 9 aa, Homo sapiens
  Table A; Target 99080; HLA-A*33:01; UGT2B11; ENSG00000213759; TAA
DPNDASTLK

SEQ ID NO: 99081 - protein, 10 aa, Homo sapiens
  Table A; Target 99081; HLA-A*23:01; UGT2B11; ENSG00000213759; TAA
DPNDASTLKF

SEQ ID NO: 99082 - protein, 10 aa, Homo sapiens
  Table A; Target 99082; HLA-A*25:01; UGT2B11; ENSG00000213759; TAA
DPNDASTLKF

SEQ ID NO: 99083 - protein, 10 aa, Homo sapiens
  Table A; Target 99083; HLA-A*26:01; UGT2B11; ENSG00000213759; TAA
DPNDASTLKF

SEQ ID NO: 99084 - protein, 10 aa, Homo sapiens
  Table A; Target 99084; HLA-A*33:01; UGT2B11; ENSG00000213759; TAA
DPNDASTLKF

SEQ ID NO: 99085 - protein, 10 aa, Homo sapiens
  Table A; Target 99085; HLA-A*33:03; UGT2B11; ENSG00000213759; TAA
DPNDASTLKF

SEQ ID NO: 99086 - protein, 10 aa, Homo sapiens
  Table A; Target 99086; HLA-A*68:01; UGT2B11; ENSG00000213759; TAA
DPNDASTLKF

SEQ ID NO: 99087 - protein, 10 aa, Homo sapiens
  Table A; Target 99087; HLA-B*18:01; UGT2B11; ENSG00000213759; TAA
DPNDASTLKF

SEQ ID NO: 99088 - protein, 10 aa, Homo sapiens
  Table A; Target 99088; HLA-B*35:01; UGT2B11; ENSG00000213759; TAA
DPNDASTLKF

SEQ ID NO: 99089 - protein, 10 aa, Homo sapiens
  Table A; Target 99089; HLA-B*38:01; UGT2B11; ENSG00000213759; TAA
DPNDASTLKF

SEQ ID NO: 99090 - protein, 10 aa, Homo sapiens
  Table A; Target 99090; HLA-B*51:01; UGT2B11; ENSG00000213759; TAA
DPNDASTLKF

SEQ ID NO: 99091 - protein, 10 aa, Homo sapiens
  Table A; Target 99091; HLA-C*07:06; UGT2B11; ENSG00000213759; TAA
DPNDASTLKF

SEQ ID NO: 99092 - protein, 8 aa, Homo sapiens
  Table A; Target 99092; HLA-B*18:01; UGT2B11; ENSG00000213759; TAA
DQFYSEVL

SEQ ID NO: 99093 - protein, 8 aa, Homo sapiens
  Table A; Target 99093; HLA-B*39:01; UGT2B11; ENSG00000213759; TAA
DQFYSEVL

SEQ ID NO: 99094 - protein, 8 aa, Homo sapiens
  Table A; Target 99094; HLA-C*07:04; UGT2B11; ENSG00000213759; TAA
DQFYSEVL

SEQ ID NO: 99095 - protein, 10 aa, Homo sapiens
  Table A; Target 99095; HLA-A*33:01; UGT2B11; ENSG00000213759; TAA
DQFYSEVLGR

SEQ ID NO: 99096 - protein, 10 aa, Homo sapiens
  Table A; Target 99096; HLA-A*33:03; UGT2B11; ENSG00000213759; TAA
DQFYSEVLGR

SEQ ID NO: 99097 - protein, 10 aa, Homo sapiens
  Table A; Target 99097; HLA-A*68:01; UGT2B11; ENSG00000213759; TAA
DQFYSEVLGR

SEQ ID NO: 99098 - protein, 10 aa, Homo sapiens
  Table A; Target 99098; HLA-C*07:06; UGT2B11; ENSG00000213759; TAA
DQFYSEVLGR

SEQ ID NO: 99099 - protein, 8 aa, Homo sapiens
  Table A; Target 99099; HLA-A*33:01; UGT2B11; ENSG00000213759; TAA
DQMTFMER

SEQ ID NO: 99100 - protein, 8 aa, Homo sapiens
  Table A; Target 99100; HLA-A*33:03; UGT2B11; ENSG00000213759; TAA
DQMTFMER

SEQ ID NO: 99101 - protein, 8 aa, Homo sapiens
  Table A; Target 99101; HLA-B*27:02; UGT2B11; ENSG00000213759; TAA
DQMTFMER

SEQ ID NO: 99102 - protein, 8 aa, Homo sapiens
  Table A; Target 99102; HLA-C*07:06; UGT2B11; ENSG00000213759; TAA
DQMTFMER

SEQ ID NO: 99103 - protein, 9 aa, Homo sapiens
  Table A; Target 99103; HLA-A*02:01; UGT2B11; ENSG00000213759; TAA
DQMTFMERV

SEQ ID NO: 99104 - protein, 9 aa, Homo sapiens
  Table A; Target 99104; HLA-A*02:03; UGT2B11; ENSG00000213759; TAA
DQMTFMERV

SEQ ID NO: 99105 - protein, 9 aa, Homo sapiens
  Table A; Target 99105; HLA-A*02:04; UGT2B11; ENSG00000213759; TAA
DQMTFMERV

SEQ ID NO: 99106 - protein, 9 aa, Homo sapiens
  Table A; Target 99106; HLA-A*68:02; UGT2B11; ENSG00000213759; TAA
DQMTFMERV

SEQ ID NO: 99107 - protein, 9 aa, Homo sapiens
  Table A; Target 99107; HLA-B*13:02; UGT2B11; ENSG00000213759; TAA
DQMTFMERV

SEQ ID NO: 99108 - protein, 9 aa, Homo sapiens
  Table A; Target 99108; HLA-B*18:01; UGT2B11; ENSG00000213759; TAA
DQMTFMERV

SEQ ID NO: 99109 - protein, 9 aa, Homo sapiens
  Table A; Target 99109; HLA-B*38:01; UGT2B11; ENSG00000213759; TAA
DQMTFMERV

SEQ ID NO: 99110 - protein, 9 aa, Homo sapiens
  Table A; Target 99110; HLA-B*51:01; UGT2B11; ENSG00000213759; TAA
DQMTFMERV

SEQ ID NO: 99111 - protein, 9 aa, Homo sapiens
  Table A; Target 99111; HLA-A*25:01; UGT2B11; ENSG00000213759; TAA
DQPDNIAHM

SEQ ID NO: 99112 - protein, 9 aa, Homo sapiens
  Table A; Target 99112; HLA-A*26:01; UGT2B11; ENSG00000213759; TAA
DQPDNIAHM

SEQ ID NO: 99113 - protein, 9 aa, Homo sapiens
  Table A; Target 99113; HLA-A*33:01; UGT2B11; ENSG00000213759; TAA
DQPDNIAHM

SEQ ID NO: 99114 - protein, 9 aa, Homo sapiens
  Table A; Target 99114; HLA-A*68:01; UGT2B11; ENSG00000213759; TAA
DQPDNIAHM

SEQ ID NO: 99115 - protein, 9 aa, Homo sapiens
  Table A; Target 99115; HLA-A*68:02; UGT2B11; ENSG00000213759; TAA
DQPDNIAHM

SEQ ID NO: 99116 - protein, 9 aa, Homo sapiens
  Table A; Target 99116; HLA-B*38:01; UGT2B11; ENSG00000213759; TAA
DQPDNIAHM

SEQ ID NO: 99117 - protein, 9 aa, Homo sapiens
  Table A; Target 99117; HLA-B*39:01; UGT2B11; ENSG00000213759; TAA
DQPDNIAHM

SEQ ID NO: 99118 - protein, 9 aa, Homo sapiens
  Table A; Target 99118; HLA-B*51:01; UGT2B11; ENSG00000213759; TAA
DQPDNIAHM

SEQ ID NO: 99119 - protein, 9 aa, Homo sapiens
  Table A; Target 99119; HLA-C*07:01; UGT2B11; ENSG00000213759; TAA
DQPDNIAHM

SEQ ID NO: 99120 - protein, 9 aa, Homo sapiens
  Table A; Target 99120; HLA-C*07:04; UGT2B11; ENSG00000213759; TAA
DQPDNIAHM

SEQ ID NO: 99121 - protein, 10 aa, Homo sapiens
  Table A; Target 99121; HLA-A*03:02; UGT2B11; ENSG00000213759; TAA
DQPDNIAHMK

SEQ ID NO: 99122 - protein, 10 aa, Homo sapiens
  Table A; Target 99122; HLA-A*11:01; UGT2B11; ENSG00000213759; TAA
DQPDNIAHMK

SEQ ID NO: 99123 - protein, 10 aa, Homo sapiens
  Table A; Target 99123; HLA-A*26:01; UGT2B11; ENSG00000213759; TAA
DQPDNIAHMK

SEQ ID NO: 99124 - protein, 10 aa, Homo sapiens
  Table A; Target 99124; HLA-A*33:01; UGT2B11; ENSG00000213759; TAA
DQPDNIAHMK

SEQ ID NO: 99125 - protein, 10 aa, Homo sapiens
  Table A; Target 99125; HLA-A*33:03; UGT2B11; ENSG00000213759; TAA
DQPDNIAHMK

SEQ ID NO: 99126 - protein, 10 aa, Homo sapiens
  Table A; Target 99126; HLA-A*68:01; UGT2B11; ENSG00000213759; TAA
DQPDNIAHMK

SEQ ID NO: 99127 - protein, 10 aa, Homo sapiens
  Table A; Target 99127; HLA-B*27:02; UGT2B11; ENSG00000213759; TAA
DQPDNIAHMK

SEQ ID NO: 99128 - protein, 10 aa, Homo sapiens
  Table A; Target 99128; HLA-C*07:01; UGT2B11; ENSG00000213759; TAA
DQPDNIAHMK

SEQ ID NO: 99129 - protein, 9 aa, Homo sapiens
  Table A; Target 99129; HLA-A*25:01; UGT2B11; ENSG00000213759; TAA
DVIGFLLAC

SEQ ID NO: 99130 - protein, 9 aa, Homo sapiens
  Table A; Target 99130; HLA-A*26:01; UGT2B11; ENSG00000213759; TAA
DVIGFLLAC

SEQ ID NO: 99131 - protein, 9 aa, Homo sapiens
  Table A; Target 99131; HLA-A*68:02; UGT2B11; ENSG00000213759; TAA
DVIGFLLAC

SEQ ID NO: 99132 - protein, 9 aa, Homo sapiens
  Table A; Target 99132; HLA-B*54:01; UGT2B11; ENSG00000213759; TAA
DVIGFLLAC

SEQ ID NO: 99133 - protein, 10 aa, Homo sapiens
  Table A; Target 99133; HLA-A*25:01; UGT2B11; ENSG00000213759; TAA
DVIGFLLACV

SEQ ID NO: 99134 - protein, 10 aa, Homo sapiens
  Table A; Target 99134; HLA-A*26:01; UGT2B11; ENSG00000213759; TAA
DVIGFLLACV

SEQ ID NO: 99135 - protein, 10 aa, Homo sapiens
  Table A; Target 99135; HLA-A*68:02; UGT2B11; ENSG00000213759; TAA
DVIGFLLACV

SEQ ID NO: 99136 - protein, 9 aa, Homo sapiens
  Table A; Target 99136; HLA-A*25:01; UGT2B11; ENSG00000213759; TAA
DVVSNKKVM

SEQ ID NO: 99137 - protein, 9 aa, Homo sapiens
  Table A; Target 99137; HLA-A*26:01; UGT2B11; ENSG00000213759; TAA
DVVSNKKVM

SEQ ID NO: 99138 - protein, 9 aa, Homo sapiens
  Table A; Target 99138; HLA-B*08:01; UGT2B11; ENSG00000213759; TAA
DVVSNKKVM

SEQ ID NO: 99139 - protein, 9 aa, Homo sapiens
  Table A; Target 99139; HLA-C*07:01; UGT2B11; ENSG00000213759; TAA
DVVSNKKVM

SEQ ID NO: 99140 - protein, 10 aa, Homo sapiens
  Table A; Target 99140; HLA-A*33:01; UGT2B11; ENSG00000213759; TAA
DVVSNKKVMK

SEQ ID NO: 99141 - protein, 10 aa, Homo sapiens
  Table A; Target 99141; HLA-A*33:03; UGT2B11; ENSG00000213759; TAA
DVVSNKKVMK

SEQ ID NO: 99142 - protein, 10 aa, Homo sapiens
  Table A; Target 99142; HLA-A*68:01; UGT2B11; ENSG00000213759; TAA
DVVSNKKVMK

SEQ ID NO: 99143 - protein, 11 aa, Homo sapiens
  Table A; Target 99143; HLA-A*33:01; UGT2B11; ENSG00000213759; TAA
DVVSNKKVMKK

SEQ ID NO: 99144 - protein, 11 aa, Homo sapiens
  Table A; Target 99144; HLA-A*68:01; UGT2B11; ENSG00000213759; TAA
DVVSNKKVMKK

SEQ ID NO: 99145 - protein, 9 aa, Homo sapiens
  Table A; Target 99145; HLA-A*25:01; UGT2B11; ENSG00000213759; TAA
EAIYHGIPM

SEQ ID NO: 99146 - protein, 9 aa, Homo sapiens
  Table A; Target 99146; HLA-A*26:01; UGT2B11; ENSG00000213759; TAA
EAIYHGIPM

SEQ ID NO: 99147 - protein, 9 aa, Homo sapiens
  Table A; Target 99147; HLA-A*33:01; UGT2B11; ENSG00000213759; TAA
EAIYHGIPM

SEQ ID NO: 99148 - protein, 9 aa, Homo sapiens
  Table A; Target 99148; HLA-A*33:03; UGT2B11; ENSG00000213759; TAA
EAIYHGIPM

SEQ ID NO: 99149 - protein, 9 aa, Homo sapiens
  Table A; Target 99149; HLA-A*68:02; UGT2B11; ENSG00000213759; TAA
EAIYHGIPM

SEQ ID NO: 99150 - protein, 9 aa, Homo sapiens
  Table A; Target 99150; HLA-B*35:01; UGT2B11; ENSG00000213759; TAA
EAIYHGIPM

SEQ ID NO: 99151 - protein, 9 aa, Homo sapiens
  Table A; Target 99151; HLA-B*35:03; UGT2B11; ENSG00000213759; TAA
EAIYHGIPM

SEQ ID NO: 99152 - protein, 9 aa, Homo sapiens
  Table A; Target 99152; HLA-B*46:01; UGT2B11; ENSG00000213759; TAA
EAIYHGIPM

SEQ ID NO: 99153 - protein, 9 aa, Homo sapiens
  Table A; Target 99153; HLA-B*54:01; UGT2B11; ENSG00000213759; TAA
EAIYHGIPM

SEQ ID NO: 99154 - protein, 9 aa, Homo sapiens
  Table A; Target 99154; HLA-C*03:03; UGT2B11; ENSG00000213759; TAA
EAIYHGIPM

SEQ ID NO: 99155 - protein, 9 aa, Homo sapiens
  Table A; Target 99155; HLA-C*03:04; UGT2B11; ENSG00000213759; TAA
EAIYHGIPM

SEQ ID NO: 99156 - protein, 10 aa, Homo sapiens
  Table A; Target 99156; HLA-A*26:01; UGT2B11; ENSG00000213759; TAA
EAIYHGIPMV

SEQ ID NO: 99157 - protein, 10 aa, Homo sapiens
  Table A; Target 99157; HLA-A*68:02; UGT2B11; ENSG00000213759; TAA
EAIYHGIPMV

SEQ ID NO: 99158 - protein, 10 aa, Homo sapiens
  Table A; Target 99158; HLA-A*33:03; UGT2B11; ENSG00000213759; TAA
EFENIIMQQV

SEQ ID NO: 99159 - protein, 10 aa, Homo sapiens
  Table A; Target 99159; HLA-A*68:02; UGT2B11; ENSG00000213759; TAA
EFENIIMQQV

SEQ ID NO: 99160 - protein, 9 aa, Homo sapiens
  Table A; Target 99160; HLA-A*23:01; UGT2B11; ENSG00000213759; TAA
ELLAALLNI

SEQ ID NO: 99161 - protein, 10 aa, Homo sapiens
  Table A; Target 99161; HLA-A*33:03; UGT2B11; ENSG00000213759; TAA
ELLAALLNIR

SEQ ID NO: 99162 - protein, 9 aa, Homo sapiens
  Table A; Target 99162; HLA-A*26:01; UGT2B11; ENSG00000213759; TAA
ELVQRGHEV

SEQ ID NO: 99163 - protein, 9 aa, Homo sapiens
  Table A; Target 99163; HLA-A*68:02; UGT2B11; ENSG00000213759; TAA
ELVQRGHEV

SEQ ID NO: 99164 - protein, 9 aa, Homo sapiens
  Table A; Target 99164; HLA-B*08:01; UGT2B11; ENSG00000213759; TAA
ELVQRGHEV

SEQ ID NO: 99165 - protein, 9 aa, Homo sapiens
  Table A; Target 99165; HLA-A*02:03; UGT2B11; ENSG00000213759; TAA
ELYDIFRNF

SEQ ID NO: 99166 - protein, 9 aa, Homo sapiens
  Table A; Target 99166; HLA-A*02:04; UGT2B11; ENSG00000213759; TAA
ELYDIFRNF

SEQ ID NO: 99167 - protein, 9 aa, Homo sapiens
  Table A; Target 99167; HLA-A*02:07; UGT2B11; ENSG00000213759; TAA
ELYDIFRNF

SEQ ID NO: 99168 - protein, 9 aa, Homo sapiens
  Table A; Target 99168; HLA-A*03:01; UGT2B11; ENSG00000213759; TAA
ELYDIFRNF

SEQ ID NO: 99169 - protein, 9 aa, Homo sapiens
  Table A; Target 99169; HLA-A*23:01; UGT2B11; ENSG00000213759; TAA
ELYDIFRNF

SEQ ID NO: 99170 - protein, 9 aa, Homo sapiens
  Table A; Target 99170; HLA-A*24:02; UGT2B11; ENSG00000213759; TAA
ELYDIFRNF

SEQ ID NO: 99171 - protein, 9 aa, Homo sapiens
  Table A; Target 99171; HLA-A*25:01; UGT2B11; ENSG00000213759; TAA
ELYDIFRNF

SEQ ID NO: 99172 - protein, 9 aa, Homo sapiens
  Table A; Target 99172; HLA-A*26:01; UGT2B11; ENSG00000213759; TAA
ELYDIFRNF

SEQ ID NO: 99173 - protein, 9 aa, Homo sapiens
  Table A; Target 99173; HLA-A*29:02; UGT2B11; ENSG00000213759; TAA
ELYDIFRNF

SEQ ID NO: 99174 - protein, 9 aa, Homo sapiens
  Table A; Target 99174; HLA-A*33:01; UGT2B11; ENSG00000213759; TAA
ELYDIFRNF

SEQ ID NO: 99175 - protein, 9 aa, Homo sapiens
  Table A; Target 99175; HLA-A*33:03; UGT2B11; ENSG00000213759; TAA
ELYDIFRNF

SEQ ID NO: 99176 - protein, 9 aa, Homo sapiens
  Table A; Target 99176; HLA-A*68:02; UGT2B11; ENSG00000213759; TAA
ELYDIFRNF

SEQ ID NO: 99177 - protein, 9 aa, Homo sapiens
  Table A; Target 99177; HLA-B*44:02; UGT2B11; ENSG00000213759; TAA
ELYDIFRNF

SEQ ID NO: 99178 - protein, 9 aa, Homo sapiens
  Table A; Target 99178; HLA-B*44:03; UGT2B11; ENSG00000213759; TAA
ELYDIFRNF

SEQ ID NO: 99179 - protein, 9 aa, Homo sapiens
  Table A; Target 99179; HLA-B*57:01; UGT2B11; ENSG00000213759; TAA
ELYDIFRNF

SEQ ID NO: 99180 - protein, 9 aa, Homo sapiens
  Table A; Target 99180; HLA-A*33:03; UGT2B11; ENSG00000213759; TAA
ENGVVVFSL

SEQ ID NO: 99181 - protein, 8 aa, Homo sapiens
  Table A; Target 99181; HLA-B*51:01; UGT2B11; ENSG00000213759; TAA
ENIIMQQV

SEQ ID NO: 99182 - protein, 8 aa, Homo sapiens
  Table A; Target 99182; HLA-C*07:01; UGT2B11; ENSG00000213759; TAA
ENIIMQQV

SEQ ID NO: 99183 - protein, 9 aa, Homo sapiens
  Table A; Target 99183; HLA-A*33:03; UGT2B11; ENSG00000213759; TAA
ENIIMQQVK

SEQ ID NO: 99184 - protein, 9 aa, Homo sapiens
  Table A; Target 99184; HLA-B*27:02; UGT2B11; ENSG00000213759; TAA
ENIIMQQVK

SEQ ID NO: 99185 - protein, 10 aa, Homo sapiens
  Table A; Target 99185; HLA-A*33:03; UGT2B11; ENSG00000213759; TAA
ENIIMQQVKR

SEQ ID NO: 99186 - protein, 10 aa, Homo sapiens
  Table A; Target 99186; HLA-A*68:01; UGT2B11; ENSG00000213759; TAA
ENIIMQQVKR

SEQ ID NO: 99187 - protein, 9 aa, Homo sapiens
  Table A; Target 99187; HLA-A*01:01; UGT2B11; ENSG00000213759; TAA
EQEILWELY

SEQ ID NO: 99188 - protein, 9 aa, Homo sapiens
  Table A; Target 99188; HLA-A*68:02; UGT2B11; ENSG00000213759; TAA
ERANVIATA

SEQ ID NO: 99189 - protein, 9 aa, Homo sapiens
  Table A; Target 99189; HLA-B*27:05; UGT2B11; ENSG00000213759; TAA
ERANVIATA

SEQ ID NO: 99190 - protein, 9 aa, Homo sapiens
  Table A; Target 99190; HLA-B*39:01; UGT2B11; ENSG00000213759; TAA
ERANVIATA

SEQ ID NO: 99191 - protein, 10 aa, Homo sapiens
  Table A; Target 99191; HLA-A*25:01; UGT2B11; ENSG00000213759; TAA
ERANVIATAL

SEQ ID NO: 99192 - protein, 10 aa, Homo sapiens
  Table A; Target 99192; HLA-A*26:01; UGT2B11; ENSG00000213759; TAA
ERANVIATAL

SEQ ID NO: 99193 - protein, 10 aa, Homo sapiens
  Table A; Target 99193; HLA-A*68:01; UGT2B11; ENSG00000213759; TAA
ERANVIATAL

SEQ ID NO: 99194 - protein, 10 aa, Homo sapiens
  Table A; Target 99194; HLA-A*68:02; UGT2B11; ENSG00000213759; TAA
ERANVIATAL

SEQ ID NO: 99195 - protein, 10 aa, Homo sapiens
  Table A; Target 99195; HLA-B*07:02; UGT2B11; ENSG00000213759; TAA
ERANVIATAL

SEQ ID NO: 99196 - protein, 10 aa, Homo sapiens
  Table A; Target 99196; HLA-B*27:02; UGT2B11; ENSG00000213759; TAA
ERANVIATAL

SEQ ID NO: 99197 - protein, 10 aa, Homo sapiens
  Table A; Target 99197; HLA-B*27:05; UGT2B11; ENSG00000213759; TAA
ERANVIATAL

SEQ ID NO: 99198 - protein, 10 aa, Homo sapiens
  Table A; Target 99198; HLA-B*38:01; UGT2B11; ENSG00000213759; TAA
ERANVIATAL

SEQ ID NO: 99199 - protein, 10 aa, Homo sapiens
  Table A; Target 99199; HLA-B*39:01; UGT2B11; ENSG00000213759; TAA
ERANVIATAL

SEQ ID NO: 99200 - protein, 10 aa, Homo sapiens
  Table A; Target 99200; HLA-C*06:02; UGT2B11; ENSG00000213759; TAA
ERANVIATAL

SEQ ID NO: 99201 - protein, 10 aa, Homo sapiens
  Table A; Target 99201; HLA-C*07:01; UGT2B11; ENSG00000213759; TAA
ERANVIATAL

SEQ ID NO: 99202 - protein, 10 aa, Homo sapiens
  Table A; Target 99202; HLA-C*07:02; UGT2B11; ENSG00000213759; TAA
ERANVIATAL

SEQ ID NO: 99203 - protein, 10 aa, Homo sapiens
  Table A; Target 99203; HLA-C*16:04; UGT2B11; ENSG00000213759; TAA
ERANVIATAL

SEQ ID NO: 99204 - protein, 8 aa, Homo sapiens
  Table A; Target 99204; HLA-C*07:01; UGT2B11; ENSG00000213759; TAA
ERVKNMIY

SEQ ID NO: 99205 - protein, 9 aa, Homo sapiens
  Table A; Target 99205; HLA-A*68:02; UGT2B11; ENSG00000213759; TAA
ERVKNMIYV

SEQ ID NO: 99206 - protein, 9 aa, Homo sapiens
  Table A; Target 99206; HLA-A*25:01; UGT2B11; ENSG00000213759; TAA
ETMGKADIW

SEQ ID NO: 99207 - protein, 9 aa, Homo sapiens
  Table A; Target 99207; HLA-A*26:01; UGT2B11; ENSG00000213759; TAA
ETMGKADIW

SEQ ID NO: 99208 - protein, 9 aa, Homo sapiens
  Table A; Target 99208; HLA-A*33:03; UGT2B11; ENSG00000213759; TAA
ETMGKADIW

SEQ ID NO: 99209 - protein, 9 aa, Homo sapiens
  Table A; Target 99209; HLA-B*44:02; UGT2B11; ENSG00000213759; TAA
ETMGKADIW

SEQ ID NO: 99210 - protein, 9 aa, Homo sapiens
  Table A; Target 99210; HLA-B*57:01; UGT2B11; ENSG00000213759; TAA
ETMGKADIW

SEQ ID NO: 99211 - protein, 11 aa, Homo sapiens
  Table A; Target 99211; HLA-A*26:01; UGT2B11; ENSG00000213759; TAA
ETMGKADIWLM

SEQ ID NO: 99212 - protein, 9 aa, Homo sapiens
  Table A; Target 99212; HLA-A*23:01; UGT2B11; ENSG00000213759; TAA
EVLGRPTTL

SEQ ID NO: 99213 - protein, 9 aa, Homo sapiens
  Table A; Target 99213; HLA-A*25:01; UGT2B11; ENSG00000213759; TAA
EVLGRPTTL

SEQ ID NO: 99214 - protein, 9 aa, Homo sapiens
  Table A; Target 99214; HLA-A*26:01; UGT2B11; ENSG00000213759; TAA
EVLGRPTTL

SEQ ID NO: 99215 - protein, 9 aa, Homo sapiens
  Table A; Target 99215; HLA-A*32:01; UGT2B11; ENSG00000213759; TAA
EVLGRPTTL

SEQ ID NO: 99216 - protein, 9 aa, Homo sapiens
  Table A; Target 99216; HLA-A*33:01; UGT2B11; ENSG00000213759; TAA
EVLGRPTTL

SEQ ID NO: 99217 - protein, 9 aa, Homo sapiens
  Table A; Target 99217; HLA-A*33:03; UGT2B11; ENSG00000213759; TAA
EVLGRPTTL

SEQ ID NO: 99218 - protein, 9 aa, Homo sapiens
  Table A; Target 99218; HLA-A*68:02; UGT2B11; ENSG00000213759; TAA
EVLGRPTTL

SEQ ID NO: 99219 - protein, 9 aa, Homo sapiens
  Table A; Target 99219; HLA-B*08:01; UGT2B11; ENSG00000213759; TAA
EVLGRPTTL

SEQ ID NO: 99220 - protein, 9 aa, Homo sapiens
  Table A; Target 99220; HLA-B*35:03; UGT2B11; ENSG00000213759; TAA
EVLGRPTTL

SEQ ID NO: 99221 - protein, 9 aa, Homo sapiens
  Table A; Target 99221; HLA-B*40:02; UGT2B11; ENSG00000213759; TAA
EVLGRPTTL

SEQ ID NO: 99222 - protein, 9 aa, Homo sapiens
  Table A; Target 99222; HLA-C*01:02; UGT2B11; ENSG00000213759; TAA
EVLGRPTTL

SEQ ID NO: 99223 - protein, 9 aa, Homo sapiens
  Table A; Target 99223; HLA-C*07:02; UGT2B11; ENSG00000213759; TAA
EVLGRPTTL

SEQ ID NO: 99224 - protein, 9 aa, Homo sapiens
  Table A; Target 99224; HLA-C*12:03; UGT2B11; ENSG00000213759; TAA
EVLGRPTTL

SEQ ID NO: 99225 - protein, 9 aa, Homo sapiens
  Table A; Target 99225; HLA-C*14:02; UGT2B11; ENSG00000213759; TAA
EVLGRPTTL

SEQ ID NO: 99226 - protein, 10 aa, Homo sapiens
  Table A; Target 99226; HLA-A*25:01; UGT2B11; ENSG00000213759; TAA
EVLGRPTTLF

SEQ ID NO: 99227 - protein, 10 aa, Homo sapiens
  Table A; Target 99227; HLA-A*26:01; UGT2B11; ENSG00000213759; TAA
EVLGRPTTLF

SEQ ID NO: 99228 - protein, 9 aa, Homo sapiens
  Table A; Target 99228; HLA-A*25:01; UGT2B11; ENSG00000213759; TAA
EVTVLASSA

SEQ ID NO: 99229 - protein, 9 aa, Homo sapiens
  Table A; Target 99229; HLA-A*26:01; UGT2B11; ENSG00000213759; TAA
EVTVLASSA

SEQ ID NO: 99230 - protein, 9 aa, Homo sapiens
  Table A; Target 99230; HLA-A*33:03; UGT2B11; ENSG00000213759; TAA
EVTVLASSA

SEQ ID NO: 99231 - protein, 9 aa, Homo sapiens
  Table A; Target 99231; HLA-B*54:01; UGT2B11; ENSG00000213759; TAA
EVTVLASSA

SEQ ID NO: 99232 - protein, 11 aa, Homo sapiens
  Table A; Target 99232; HLA-A*25:01; UGT2B11; ENSG00000213759; TAA
EVTVLASSASI

SEQ ID NO: 99233 - protein, 9 aa, Homo sapiens
  Table A; Target 99233; HLA-A*01:01; UGT2B11; ENSG00000213759; TAA
EVYPTSLTK

SEQ ID NO: 99234 - protein, 9 aa, Homo sapiens
  Table A; Target 99234; HLA-A*03:01; UGT2B11; ENSG00000213759; TAA
EVYPTSLTK

SEQ ID NO: 99235 - protein, 9 aa, Homo sapiens
  Table A; Target 99235; HLA-A*03:02; UGT2B11; ENSG00000213759; TAA
EVYPTSLTK

SEQ ID NO: 99236 - protein, 9 aa, Homo sapiens
  Table A; Target 99236; HLA-A*11:01; UGT2B11; ENSG00000213759; TAA
EVYPTSLTK

SEQ ID NO: 99237 - protein, 9 aa, Homo sapiens
  Table A; Target 99237; HLA-A*25:01; UGT2B11; ENSG00000213759; TAA
EVYPTSLTK

SEQ ID NO: 99238 - protein, 9 aa, Homo sapiens
  Table A; Target 99238; HLA-A*26:01; UGT2B11; ENSG00000213759; TAA
EVYPTSLTK

SEQ ID NO: 99239 - protein, 9 aa, Homo sapiens
  Table A; Target 99239; HLA-A*29:02; UGT2B11; ENSG00000213759; TAA
EVYPTSLTK

SEQ ID NO: 99240 - protein, 9 aa, Homo sapiens
  Table A; Target 99240; HLA-A*31:01; UGT2B11; ENSG00000213759; TAA
EVYPTSLTK

SEQ ID NO: 99241 - protein, 9 aa, Homo sapiens
  Table A; Target 99241; HLA-A*33:01; UGT2B11; ENSG00000213759; TAA
EVYPTSLTK

SEQ ID NO: 99242 - protein, 9 aa, Homo sapiens
  Table A; Target 99242; HLA-A*33:03; UGT2B11; ENSG00000213759; TAA
EVYPTSLTK

SEQ ID NO: 99243 - protein, 9 aa, Homo sapiens
  Table A; Target 99243; HLA-A*68:01; UGT2B11; ENSG00000213759; TAA
EVYPTSLTK

SEQ ID NO: 99244 - protein, 9 aa, Homo sapiens
  Table A; Target 99244; HLA-A*68:02; UGT2B11; ENSG00000213759; TAA
EVYPTSLTK

SEQ ID NO: 99245 - protein, 9 aa, Homo sapiens
  Table A; Target 99245; HLA-B*13:02; UGT2B11; ENSG00000213759; TAA
EVYPTSLTK

SEQ ID NO: 99246 - protein, 9 aa, Homo sapiens
  Table A; Target 99246; HLA-B*27:05; UGT2B11; ENSG00000213759; TAA
EVYPTSLTK

SEQ ID NO: 99247 - protein, 9 aa, Homo sapiens
  Table A; Target 99247; HLA-B*35:01; UGT2B11; ENSG00000213759; TAA
EVYPTSLTK

SEQ ID NO: 99248 - protein, 9 aa, Homo sapiens
  Table A; Target 99248; HLA-B*51:01; UGT2B11; ENSG00000213759; TAA
EVYPTSLTK

SEQ ID NO: 99249 - protein, 9 aa, Homo sapiens
  Table A; Target 99249; HLA-C*02:02; UGT2B11; ENSG00000213759; TAA
EVYPTSLTK

SEQ ID NO: 99250 - protein, 9 aa, Homo sapiens
  Table A; Target 99250; HLA-C*03:03; UGT2B11; ENSG00000213759; TAA
EVYPTSLTK

SEQ ID NO: 99251 - protein, 9 aa, Homo sapiens
  Table A; Target 99251; HLA-C*06:02; UGT2B11; ENSG00000213759; TAA
EVYPTSLTK

SEQ ID NO: 99252 - protein, 9 aa, Homo sapiens
  Table A; Target 99252; HLA-C*07:06; UGT2B11; ENSG00000213759; TAA
EVYPTSLTK

SEQ ID NO: 99253 - protein, 10 aa, Homo sapiens
  Table A; Target 99253; HLA-A*25:01; UGT2B11; ENSG00000213759; TAA
EVYPTSLTKT

SEQ ID NO: 99254 - protein, 10 aa, Homo sapiens
  Table A; Target 99254; HLA-A*26:01; UGT2B11; ENSG00000213759; TAA
EVYPTSLTKT

SEQ ID NO: 99255 - protein, 10 aa, Homo sapiens
  Table A; Target 99255; HLA-A*33:01; UGT2B11; ENSG00000213759; TAA
EVYPTSLTKT

SEQ ID NO: 99256 - protein, 10 aa, Homo sapiens
  Table A; Target 99256; HLA-A*33:03; UGT2B11; ENSG00000213759; TAA
EVYPTSLTKT

SEQ ID NO: 99257 - protein, 10 aa, Homo sapiens
  Table A; Target 99257; HLA-A*68:01; UGT2B11; ENSG00000213759; TAA
EVYPTSLTKT

SEQ ID NO: 99258 - protein, 10 aa, Homo sapiens
  Table A; Target 99258; HLA-A*68:02; UGT2B11; ENSG00000213759; TAA
EVYPTSLTKT

SEQ ID NO: 99259 - protein, 11 aa, Homo sapiens
  Table A; Target 99259; HLA-A*33:01; UGT2B11; ENSG00000213759; TAA
EVYPTSLTKTE

SEQ ID NO: 99260 - protein, 9 aa, Homo sapiens
  Table A; Target 99260; HLA-B*54:01; UGT2B11; ENSG00000213759; TAA
FADAVFPCG

SEQ ID NO: 99261 - protein, 9 aa, Homo sapiens
  Table A; Target 99261; HLA-A*03:01; UGT2B11; ENSG00000213759; TAA
FCKDVVSNK

SEQ ID NO: 99262 - protein, 9 aa, Homo sapiens
  Table A; Target 99262; HLA-A*31:01; UGT2B11; ENSG00000213759; TAA
FCKDVVSNK

SEQ ID NO: 99263 - protein, 9 aa, Homo sapiens
  Table A; Target 99263; HLA-A*33:01; UGT2B11; ENSG00000213759; TAA
FCKDVVSNK

SEQ ID NO: 99264 - protein, 9 aa, Homo sapiens
  Table A; Target 99264; HLA-A*33:03; UGT2B11; ENSG00000213759; TAA
FCKDVVSNK

SEQ ID NO: 99265 - protein, 9 aa, Homo sapiens
  Table A; Target 99265; HLA-A*30:01; UGT2B11; ENSG00000213759; TAA
FDGNKPDAL

SEQ ID NO: 99266 - protein, 9 aa, Homo sapiens
  Table A; Target 99266; HLA-B*38:01; UGT2B11; ENSG00000213759; TAA
FDGNKPDAL

SEQ ID NO: 99267 - protein, 9 aa, Homo sapiens
  Table A; Target 99267; HLA-B*40:01; UGT2B11; ENSG00000213759; TAA
FDGNKPDAL

SEQ ID NO: 99268 - protein, 9 aa, Homo sapiens
  Table A; Target 99268; HLA-B*40:02; UGT2B11; ENSG00000213759; TAA
FDGNKPDAL

SEQ ID NO: 99269 - protein, 9 aa, Homo sapiens
  Table A; Target 99269; HLA-C*07:02; UGT2B11; ENSG00000213759; TAA
FDGNKPDAL

SEQ ID NO: 99270 - protein, 9 aa, Homo sapiens
  Table A; Target 99270; HLA-C*07:04; UGT2B11; ENSG00000213759; TAA
FDGNKPDAL

SEQ ID NO: 99271 - protein, 9 aa, Homo sapiens
  Table A; Target 99271; HLA-B*40:02; UGT2B11; ENSG00000213759; TAA
FDIVFADAV

SEQ ID NO: 99272 - protein, 9 aa, Homo sapiens
  Table A; Target 99272; HLA-B*49:01; UGT2B11; ENSG00000213759; TAA
FDIVFADAV

SEQ ID NO: 99273 - protein, 9 aa, Homo sapiens
  Table A; Target 99273; HLA-A*02:07; UGT2B11; ENSG00000213759; TAA
FDPNDASTL

SEQ ID NO: 99274 - protein, 9 aa, Homo sapiens
  Table A; Target 99274; HLA-A*30:01; UGT2B11; ENSG00000213759; TAA
FDPNDASTL

SEQ ID NO: 99275 - protein, 9 aa, Homo sapiens
  Table A; Target 99275; HLA-B*38:01; UGT2B11; ENSG00000213759; TAA
FDPNDASTL

SEQ ID NO: 99276 - protein, 9 aa, Homo sapiens
  Table A; Target 99276; HLA-B*40:01; UGT2B11; ENSG00000213759; TAA
FDPNDASTL

SEQ ID NO: 99277 - protein, 9 aa, Homo sapiens
  Table A; Target 99277; HLA-C*01:02; UGT2B11; ENSG00000213759; TAA
FDPNDASTL

SEQ ID NO: 99278 - protein, 9 aa, Homo sapiens
  Table A; Target 99278; HLA-C*14:02; UGT2B11; ENSG00000213759; TAA
FDPNDASTL

SEQ ID NO: 99279 - protein, 11 aa, Homo sapiens
  Table A; Target 99279; HLA-A*24:02; UGT2B11; ENSG00000213759; TAA
FDPNDASTLKF

SEQ ID NO: 99280 - protein, 11 aa, Homo sapiens
  Table A; Target 99280; HLA-A*26:01; UGT2B11; ENSG00000213759; TAA
FDPNDASTLKF

SEQ ID NO: 99281 - protein, 10 aa, Homo sapiens
  Table A; Target 99281; HLA-B*40:02; UGT2B11; ENSG00000213759; TAA
FDQPDNIAHM

SEQ ID NO: 99282 - protein, 10 aa, Homo sapiens
  Table A; Target 99282; HLA-C*04:01; UGT2B11; ENSG00000213759; TAA
FDQPDNIAHM

SEQ ID NO: 99283 - protein, 10 aa, Homo sapiens
  Table A; Target 99283; HLA-C*07:01; UGT2B11; ENSG00000213759; TAA
FDQPDNIAHM

SEQ ID NO: 99284 - protein, 10 aa, Homo sapiens
  Table A; Target 99284; HLA-C*12:03; UGT2B11; ENSG00000213759; TAA
FDQPDNIAHM

SEQ ID NO: 99285 - protein, 11 aa, Homo sapiens
  Table A; Target 99285; HLA-A*03:02; UGT2B11; ENSG00000213759; TAA
FDQPDNIAHMK

SEQ ID NO: 99286 - protein, 9 aa, Homo sapiens
  Table A; Target 99286; HLA-A*02:03; UGT2B11; ENSG00000213759; TAA
FENIIMQQV

SEQ ID NO: 99287 - protein, 9 aa, Homo sapiens
  Table A; Target 99287; HLA-A*02:07; UGT2B11; ENSG00000213759; TAA
FENIIMQQV

SEQ ID NO: 99288 - protein, 9 aa, Homo sapiens
  Table A; Target 99288; HLA-A*30:01; UGT2B11; ENSG00000213759; TAA
FENIIMQQV

SEQ ID NO: 99289 - protein, 9 aa, Homo sapiens
  Table A; Target 99289; HLA-A*68:02; UGT2B11; ENSG00000213759; TAA
FENIIMQQV

SEQ ID NO: 99290 - protein, 9 aa, Homo sapiens
  Table A; Target 99290; HLA-B*13:02; UGT2B11; ENSG00000213759; TAA
FENIIMQQV

SEQ ID NO: 99291 - protein, 9 aa, Homo sapiens
  Table A; Target 99291; HLA-B*18:01; UGT2B11; ENSG00000213759; TAA
FENIIMQQV

SEQ ID NO: 99292 - protein, 9 aa, Homo sapiens
  Table A; Target 99292; HLA-B*27:05; UGT2B11; ENSG00000213759; TAA
FENIIMQQV

SEQ ID NO: 99293 - protein, 9 aa, Homo sapiens
  Table A; Target 99293; HLA-B*37:01; UGT2B11; ENSG00000213759; TAA
FENIIMQQV

SEQ ID NO: 99294 - protein, 9 aa, Homo sapiens
  Table A; Target 99294; HLA-B*38:01; UGT2B11; ENSG00000213759; TAA
FENIIMQQV

SEQ ID NO: 99295 - protein, 9 aa, Homo sapiens
  Table A; Target 99295; HLA-B*39:01; UGT2B11; ENSG00000213759; TAA
FENIIMQQV

SEQ ID NO: 99296 - protein, 9 aa, Homo sapiens
  Table A; Target 99296; HLA-B*40:01; UGT2B11; ENSG00000213759; TAA
FENIIMQQV

SEQ ID NO: 99297 - protein, 9 aa, Homo sapiens
  Table A; Target 99297; HLA-B*40:02; UGT2B11; ENSG00000213759; TAA
FENIIMQQV

SEQ ID NO: 99298 - protein, 9 aa, Homo sapiens
  Table A; Target 99298; HLA-B*44:02; UGT2B11; ENSG00000213759; TAA
FENIIMQQV

SEQ ID NO: 99299 - protein, 9 aa, Homo sapiens
  Table A; Target 99299; HLA-B*44:03; UGT2B11; ENSG00000213759; TAA
FENIIMQQV

SEQ ID NO: 99300 - protein, 9 aa, Homo sapiens
  Table A; Target 99300; HLA-B*49:01; UGT2B11; ENSG00000213759; TAA
FENIIMQQV

SEQ ID NO: 99301 - protein, 9 aa, Homo sapiens
  Table A; Target 99301; HLA-B*51:01; UGT2B11; ENSG00000213759; TAA
FENIIMQQV

SEQ ID NO: 99302 - protein, 9 aa, Homo sapiens
  Table A; Target 99302; HLA-B*54:01; UGT2B11; ENSG00000213759; TAA
FENIIMQQV

SEQ ID NO: 99303 - protein, 9 aa, Homo sapiens
  Table A; Target 99303; HLA-C*02:02; UGT2B11; ENSG00000213759; TAA
FENIIMQQV

SEQ ID NO: 99304 - protein, 9 aa, Homo sapiens
  Table A; Target 99304; HLA-C*04:01; UGT2B11; ENSG00000213759; TAA
FENIIMQQV

SEQ ID NO: 99305 - protein, 9 aa, Homo sapiens
  Table A; Target 99305; HLA-C*06:02; UGT2B11; ENSG00000213759; TAA
FENIIMQQV

SEQ ID NO: 99306 - protein, 9 aa, Homo sapiens
  Table A; Target 99306; HLA-C*07:01; UGT2B11; ENSG00000213759; TAA
FENIIMQQV

SEQ ID NO: 99307 - protein, 9 aa, Homo sapiens
  Table A; Target 99307; HLA-C*07:04; UGT2B11; ENSG00000213759; TAA
FENIIMQQV

SEQ ID NO: 99308 - protein, 9 aa, Homo sapiens
  Table A; Target 99308; HLA-C*12:03; UGT2B11; ENSG00000213759; TAA
FENIIMQQV

SEQ ID NO: 99309 - protein, 9 aa, Homo sapiens
  Table A; Target 99309; HLA-C*16:02; UGT2B11; ENSG00000213759; TAA
FENIIMQQV

SEQ ID NO: 99310 - protein, 9 aa, Homo sapiens
  Table A; Target 99310; HLA-C*16:04; UGT2B11; ENSG00000213759; TAA
FENIIMQQV

SEQ ID NO: 99311 - protein, 10 aa, Homo sapiens
  Table A; Target 99311; HLA-B*49:01; UGT2B11; ENSG00000213759; TAA
FENIIMQQVK

SEQ ID NO: 99312 - protein, 9 aa, Homo sapiens
  Table A; Target 99312; HLA-B*40:01; UGT2B11; ENSG00000213759; TAA
FETMGKADI

SEQ ID NO: 99313 - protein, 9 aa, Homo sapiens
  Table A; Target 99313; HLA-B*49:01; UGT2B11; ENSG00000213759; TAA
FETMGKADI

SEQ ID NO: 99314 - protein, 9 aa, Homo sapiens
  Table A; Target 99314; HLA-C*07:04; UGT2B11; ENSG00000213759; TAA
FETMGKADI

SEQ ID NO: 99315 - protein, 10 aa, Homo sapiens
  Table A; Target 99315; HLA-B*44:02; UGT2B11; ENSG00000213759; TAA
FETMGKADIW

SEQ ID NO: 99316 - protein, 8 aa, Homo sapiens
  Table A; Target 99316; HLA-A*30:01; UGT2B11; ENSG00000213759; TAA
FEVYPTSL

SEQ ID NO: 99317 - protein, 8 aa, Homo sapiens
  Table A; Target 99317; HLA-B*08:01; UGT2B11; ENSG00000213759; TAA
FEVYPTSL

SEQ ID NO: 99318 - protein, 8 aa, Homo sapiens
  Table A; Target 99318; HLA-B*18:01; UGT2B11; ENSG00000213759; TAA
FEVYPTSL

SEQ ID NO: 99319 - protein, 8 aa, Homo sapiens
  Table A; Target 99319; HLA-B*37:01; UGT2B11; ENSG00000213759; TAA
FEVYPTSL

SEQ ID NO: 99320 - protein, 8 aa, Homo sapiens
  Table A; Target 99320; HLA-B*39:01; UGT2B11; ENSG00000213759; TAA
FEVYPTSL

SEQ ID NO: 99321 - protein, 8 aa, Homo sapiens
  Table A; Target 99321; HLA-B*40:01; UGT2B11; ENSG00000213759; TAA
FEVYPTSL

SEQ ID NO: 99322 - protein, 8 aa, Homo sapiens
  Table A; Target 99322; HLA-B*40:02; UGT2B11; ENSG00000213759; TAA
FEVYPTSL

SEQ ID NO: 99323 - protein, 8 aa, Homo sapiens
  Table A; Target 99323; HLA-B*49:01; UGT2B11; ENSG00000213759; TAA
FEVYPTSL

SEQ ID NO: 99324 - protein, 8 aa, Homo sapiens
  Table A; Target 99324; HLA-C*03:03; UGT2B11; ENSG00000213759; TAA
FEVYPTSL

SEQ ID NO: 99325 - protein, 8 aa, Homo sapiens
  Table A; Target 99325; HLA-C*03:04; UGT2B11; ENSG00000213759; TAA
FEVYPTSL

SEQ ID NO: 99326 - protein, 8 aa, Homo sapiens
  Table A; Target 99326; HLA-C*07:04; UGT2B11; ENSG00000213759; TAA
FEVYPTSL

SEQ ID NO: 99327 - protein, 9 aa, Homo sapiens
  Table A; Target 99327; HLA-B*49:01; UGT2B11; ENSG00000213759; TAA
FEVYPTSLT

SEQ ID NO: 99328 - protein, 10 aa, Homo sapiens
  Table A; Target 99328; HLA-B*27:02; UGT2B11; ENSG00000213759; TAA
FEVYPTSLTK

SEQ ID NO: 99329 - protein, 10 aa, Homo sapiens
  Table A; Target 99329; HLA-B*49:01; UGT2B11; ENSG00000213759; TAA
FEVYPTSLTK

SEQ ID NO: 99330 - protein, 11 aa, Homo sapiens
  Table A; Target 99330; HLA-B*49:01; UGT2B11; ENSG00000213759; TAA
FEVYPTSLTKT

SEQ ID NO: 99331 - protein, 8 aa, Homo sapiens
  Table A; Target 99331; HLA-C*04:01; UGT2B11; ENSG00000213759; TAA
FFDQPDNI

SEQ ID NO: 99332 - protein, 9 aa, Homo sapiens
  Table A; Target 99332; HLA-B*35:03; UGT2B11; ENSG00000213759; TAA
FFDQPDNIA

SEQ ID NO: 99333 - protein, 10 aa, Homo sapiens
  Table A; Target 99333; HLA-C*04:01; UGT2B11; ENSG00000213759; TAA
FFDQPDNIAH

SEQ ID NO: 99334 - protein, 11 aa, Homo sapiens
  Table A; Target 99334; HLA-A*02:07; UGT2B11; ENSG00000213759; TAA
FFDQPDNIAHM

SEQ ID NO: 99335 - protein, 11 aa, Homo sapiens
  Table A; Target 99335; HLA-B*55:01; UGT2B11; ENSG00000213759; TAA
FFDQPDNIAHM

SEQ ID NO: 99336 - protein, 11 aa, Homo sapiens
  Table A; Target 99336; HLA-C*04:01; UGT2B11; ENSG00000213759; TAA
FFDQPDNIAHM

SEQ ID NO: 99337 - protein, 9 aa, Homo sapiens
  Table A; Target 99337; HLA-A*02:01; UGT2B11; ENSG00000213759; TAA
FLLACVATV

SEQ ID NO: 99338 - protein, 9 aa, Homo sapiens
  Table A; Target 99338; HLA-A*02:03; UGT2B11; ENSG00000213759; TAA
FLLACVATV

SEQ ID NO: 99339 - protein, 9 aa, Homo sapiens
  Table A; Target 99339; HLA-A*02:04; UGT2B11; ENSG00000213759; TAA
FLLACVATV

SEQ ID NO: 99340 - protein, 9 aa, Homo sapiens
  Table A; Target 99340; HLA-B*55:01; UGT2B11; ENSG00000213759; TAA
FLLACVATV

SEQ ID NO: 99341 - protein, 8 aa, Homo sapiens
  Table A; Target 99341; HLA-A*02:07; UGT2B11; ENSG00000213759; TAA
FLPNVDFV

SEQ ID NO: 99342 - protein, 10 aa, Homo sapiens
  Table A; Target 99342; HLA-A*02:07; UGT2B11; ENSG00000213759; TAA
FLPNVDFVGG

SEQ ID NO: 99343 - protein, 11 aa, Homo sapiens
  Table A; Target 99343; HLA-A*02:07; UGT2B11; ENSG00000213759; TAA
FLPNVDFVGGF

SEQ ID NO: 99344 - protein, 10 aa, Homo sapiens
  Table A; Target 99344; HLA-A*01:01; UGT2B11; ENSG00000213759; TAA
FMERVKNMIY

SEQ ID NO: 99345 - protein, 9 aa, Homo sapiens
  Table A; Target 99345; HLA-B*39:01; UGT2B11; ENSG00000213759; TAA
FNTMSSTDL

SEQ ID NO: 99346 - protein, 9 aa, Homo sapiens
  Table A; Target 99346; HLA-C*07:02; UGT2B11; ENSG00000213759; TAA
FNTMSSTDL

SEQ ID NO: 99347 - protein, 10 aa, Homo sapiens
  Table A; Target 99347; HLA-C*07:02; UGT2B11; ENSG00000213759; TAA
FNTMSSTDLL

SEQ ID NO: 99348 - protein, 9 aa, Homo sapiens
  Table A; Target 99348; HLA-B*54:01; UGT2B11; ENSG00000213759; TAA
FPCGELLAA

SEQ ID NO: 99349 - protein, 9 aa, Homo sapiens
  Table A; Target 99349; HLA-B*56:01; UGT2B11; ENSG00000213759; TAA
FPCGELLAA

SEQ ID NO: 99350 - protein, 10 aa, Homo sapiens
  Table A; Target 99350; HLA-B*35:03; UGT2B11; ENSG00000213759; TAA
FPCGELLAAL

SEQ ID NO: 99351 - protein, 9 aa, Homo sapiens
  Table A; Target 99351; HLA-A*02:01; UGT2B11; ENSG00000213759; TAA
FPHPFLPNV

SEQ ID NO: 99352 - protein, 9 aa, Homo sapiens
  Table A; Target 99352; HLA-A*02:04; UGT2B11; ENSG00000213759; TAA
FPHPFLPNV

SEQ ID NO: 99353 - protein, 9 aa, Homo sapiens
  Table A; Target 99353; HLA-A*02:07; UGT2B11; ENSG00000213759; TAA
FPHPFLPNV

SEQ ID NO: 99354 - protein, 9 aa, Homo sapiens
  Table A; Target 99354; HLA-A*68:02; UGT2B11; ENSG00000213759; TAA
FPHPFLPNV

SEQ ID NO: 99355 - protein, 9 aa, Homo sapiens
  Table A; Target 99355; HLA-B*51:01; UGT2B11; ENSG00000213759; TAA
FPHPFLPNV

SEQ ID NO: 99356 - protein, 9 aa, Homo sapiens
  Table A; Target 99356; HLA-B*54:01; UGT2B11; ENSG00000213759; TAA
FPHPFLPNV

SEQ ID NO: 99357 - protein, 9 aa, Homo sapiens
  Table A; Target 99357; HLA-B*56:01; UGT2B11; ENSG00000213759; TAA
FPHPFLPNV

SEQ ID NO: 99358 - protein, 8 aa, Homo sapiens
  Table A; Target 99358; HLA-B*51:01; UGT2B11; ENSG00000213759; TAA
FPPSYIPI

SEQ ID NO: 99359 - protein, 9 aa, Homo sapiens
  Table A; Target 99359; HLA-A*02:07; UGT2B11; ENSG00000213759; TAA
FPPSYIPIV

SEQ ID NO: 99360 - protein, 9 aa, Homo sapiens
  Table A; Target 99360; HLA-B*51:01; UGT2B11; ENSG00000213759; TAA
FPPSYIPIV

SEQ ID NO: 99361 - protein, 9 aa, Homo sapiens
  Table A; Target 99361; HLA-B*54:01; UGT2B11; ENSG00000213759; TAA
FPPSYIPIV

SEQ ID NO: 99362 - protein, 9 aa, Homo sapiens
  Table A; Target 99362; HLA-B*56:01; UGT2B11; ENSG00000213759; TAA
FPPSYIPIV

SEQ ID NO: 99363 - protein, 10 aa, Homo sapiens
  Table A; Target 99363; HLA-B*35:01; UGT2B11; ENSG00000213759; TAA
FPPSYIPIVM

SEQ ID NO: 99364 - protein, 10 aa, Homo sapiens
  Table A; Target 99364; HLA-B*35:03; UGT2B11; ENSG00000213759; TAA
FPPSYIPIVM

SEQ ID NO: 99365 - protein, 10 aa, Homo sapiens
  Table A; Target 99365; HLA-B*51:01; UGT2B11; ENSG00000213759; TAA
FPPSYIPIVM

SEQ ID NO: 99366 - protein, 10 aa, Homo sapiens
  Table A; Target 99366; HLA-B*54:01; UGT2B11; ENSG00000213759; TAA
FPPSYIPIVM

SEQ ID NO: 99367 - protein, 10 aa, Homo sapiens
  Table A; Target 99367; HLA-B*56:01; UGT2B11; ENSG00000213759; TAA
FPPSYIPIVM

SEQ ID NO: 99368 - protein, 8 aa, Homo sapiens
  Table A; Target 99368; HLA-A*02:04; UGT2B11; ENSG00000213759; TAA
FQFPHPFL

SEQ ID NO: 99369 - protein, 8 aa, Homo sapiens
  Table A; Target 99369; HLA-B*13:02; UGT2B11; ENSG00000213759; TAA
FQFPHPFL

SEQ ID NO: 99370 - protein, 9 aa, Homo sapiens
  Table A; Target 99370; HLA-A*02:01; UGT2B11; ENSG00000213759; TAA
FQFPHPFLP

SEQ ID NO: 99371 - protein, 9 aa, Homo sapiens
  Table A; Target 99371; HLA-A*02:03; UGT2B11; ENSG00000213759; TAA
FQFPHPFLP

SEQ ID NO: 99372 - protein, 9 aa, Homo sapiens
  Table A; Target 99372; HLA-A*02:04; UGT2B11; ENSG00000213759; TAA
FQFPHPFLP

SEQ ID NO: 99373 - protein, 11 aa, Homo sapiens
  Table A; Target 99373; HLA-A*02:01; UGT2B11; ENSG00000213759; TAA
FQFPHPFLPNV

SEQ ID NO: 99374 - protein, 11 aa, Homo sapiens
  Table A; Target 99374; HLA-A*02:03; UGT2B11; ENSG00000213759; TAA
FQFPHPFLPNV

SEQ ID NO: 99375 - protein, 11 aa, Homo sapiens
  Table A; Target 99375; HLA-A*02:04; UGT2B11; ENSG00000213759; TAA
FQFPHPFLPNV

SEQ ID NO: 99376 - protein, 9 aa, Homo sapiens
  Table A; Target 99376; HLA-B*44:02; UGT2B11; ENSG00000213759; TAA
FQMSDMKKW

SEQ ID NO: 99377 - protein, 8 aa, Homo sapiens
  Table A; Target 99377; HLA-B*13:02; UGT2B11; ENSG00000213759; TAA
FQYHSLDV

SEQ ID NO: 99378 - protein, 9 aa, Homo sapiens
  Table A; Target 99378; HLA-A*02:03; UGT2B11; ENSG00000213759; TAA
FQYHSLDVI

SEQ ID NO: 99379 - protein, 9 aa, Homo sapiens
  Table A; Target 99379; HLA-B*13:02; UGT2B11; ENSG00000213759; TAA
FQYHSLDVI

SEQ ID NO: 99380 - protein, 9 aa, Homo sapiens
  Table A; Target 99380; HLA-C*12:03; UGT2B11; ENSG00000213759; TAA
FSLGSVISN

SEQ ID NO: 99381 - protein, 10 aa, Homo sapiens
  Table A; Target 99381; HLA-C*02:02; UGT2B11; ENSG00000213759; TAA
FSLGSVISNM

SEQ ID NO: 99382 - protein, 10 aa, Homo sapiens
  Table A; Target 99382; HLA-C*03:03; UGT2B11; ENSG00000213759; TAA
FSLGSVISNM

SEQ ID NO: 99383 - protein, 10 aa, Homo sapiens
  Table A; Target 99383; HLA-C*03:04; UGT2B11; ENSG00000213759; TAA
FSLGSVISNM

SEQ ID NO: 99384 - protein, 10 aa, Homo sapiens
  Table A; Target 99384; HLA-C*07:02; UGT2B11; ENSG00000213759; TAA
FSLGSVISNM

SEQ ID NO: 99385 - protein, 9 aa, Homo sapiens
  Table A; Target 99385; HLA-B*57:01; UGT2B11; ENSG00000213759; TAA
FSQEQEILW

SEQ ID NO: 99386 - protein, 9 aa, Homo sapiens
  Table A; Target 99386; HLA-B*58:01; UGT2B11; ENSG00000213759; TAA
FSQEQEILW

SEQ ID NO: 99387 - protein, 10 aa, Homo sapiens
  Table A; Target 99387; HLA-C*03:03; UGT2B11; ENSG00000213759; TAA
FSSGSCGKVL

SEQ ID NO: 99388 - protein, 10 aa, Homo sapiens
  Table A; Target 99388; HLA-C*03:04; UGT2B11; ENSG00000213759; TAA
FSSGSCGKVL

SEQ ID NO: 99389 - protein, 9 aa, Homo sapiens
  Table A; Target 99389; HLA-A*02:07; UGT2B11; ENSG00000213759; TAA
FTPGYTIER

SEQ ID NO: 99390 - protein, 9 aa, Homo sapiens
  Table A; Target 99390; HLA-A*11:01; UGT2B11; ENSG00000213759; TAA
FTPGYTIER

SEQ ID NO: 99391 - protein, 9 aa, Homo sapiens
  Table A; Target 99391; HLA-A*26:01; UGT2B11; ENSG00000213759; TAA
FTPGYTIER

SEQ ID NO: 99392 - protein, 9 aa, Homo sapiens
  Table A; Target 99392; HLA-A*29:02; UGT2B11; ENSG00000213759; TAA
FTPGYTIER

SEQ ID NO: 99393 - protein, 9 aa, Homo sapiens
  Table A; Target 99393; HLA-A*31:01; UGT2B11; ENSG00000213759; TAA
FTPGYTIER

SEQ ID NO: 99394 - protein, 9 aa, Homo sapiens
  Table A; Target 99394; HLA-A*33:01; UGT2B11; ENSG00000213759; TAA
FTPGYTIER

SEQ ID NO: 99395 - protein, 9 aa, Homo sapiens
  Table A; Target 99395; HLA-A*33:03; UGT2B11; ENSG00000213759; TAA
FTPGYTIER

SEQ ID NO: 99396 - protein, 9 aa, Homo sapiens
  Table A; Target 99396; HLA-A*68:01; UGT2B11; ENSG00000213759; TAA
FTPGYTIER

SEQ ID NO: 99397 - protein, 9 aa, Homo sapiens
  Table A; Target 99397; HLA-A*68:02; UGT2B11; ENSG00000213759; TAA
FTPGYTIER

SEQ ID NO: 99398 - protein, 9 aa, Homo sapiens
  Table A; Target 99398; HLA-B*27:02; UGT2B11; ENSG00000213759; TAA
FTPGYTIER

SEQ ID NO: 99399 - protein, 9 aa, Homo sapiens
  Table A; Target 99399; HLA-C*01:02; UGT2B11; ENSG00000213759; TAA
FTPGYTIER

SEQ ID NO: 99400 - protein, 9 aa, Homo sapiens
  Table A; Target 99400; HLA-C*02:02; UGT2B11; ENSG00000213759; TAA
FTPGYTIER

SEQ ID NO: 99401 - protein, 9 aa, Homo sapiens
  Table A; Target 99401; HLA-C*07:02; UGT2B11; ENSG00000213759; TAA
FTPGYTIER

SEQ ID NO: 99402 - protein, 9 aa, Homo sapiens
  Table A; Target 99402; HLA-C*07:06; UGT2B11; ENSG00000213759; TAA
FTPGYTIER

SEQ ID NO: 99403 - protein, 9 aa, Homo sapiens
  Table A; Target 99403; HLA-A*03:01; UGT2B11; ENSG00000213759; TAA
FVMPHKGAK

SEQ ID NO: 99404 - protein, 9 aa, Homo sapiens
  Table A; Target 99404; HLA-A*03:02; UGT2B11; ENSG00000213759; TAA
FVMPHKGAK

SEQ ID NO: 99405 - protein, 9 aa, Homo sapiens
  Table A; Target 99405; HLA-A*11:01; UGT2B11; ENSG00000213759; TAA
FVMPHKGAK

SEQ ID NO: 99406 - protein, 9 aa, Homo sapiens
  Table A; Target 99406; HLA-A*32:01; UGT2B11; ENSG00000213759; TAA
FVMPHKGAK

SEQ ID NO: 99407 - protein, 8 aa, Homo sapiens
  Table A; Target 99407; HLA-C*12:03; UGT2B11; ENSG00000213759; TAA
FVQSSGEN

SEQ ID NO: 99408 - protein, 10 aa, Homo sapiens
  Table A; Target 99408; HLA-B*39:01; UGT2B11; ENSG00000213759; TAA
FVQSSGENGV

SEQ ID NO: 99409 - protein, 11 aa, Homo sapiens
  Table A; Target 99409; HLA-B*27:05; UGT2B11; ENSG00000213759; TAA
FVQSSGENGVV

SEQ ID NO: 99410 - protein, 11 aa, Homo sapiens
  Table A; Target 99410; HLA-C*04:01; UGT2B11; ENSG00000213759; TAA
FVQSSGENGVV

SEQ ID NO: 99411 - protein, 11 aa, Homo sapiens
  Table A; Target 99411; HLA-C*06:02; UGT2B11; ENSG00000213759; TAA
FVQSSGENGVV

SEQ ID NO: 99412 - protein, 11 aa, Homo sapiens
  Table A; Target 99412; HLA-C*12:03; UGT2B11; ENSG00000213759; TAA
FVQSSGENGVV

SEQ ID NO: 99413 - protein, 8 aa, Homo sapiens
  Table A; Target 99413; HLA-A*33:03; UGT2B11; ENSG00000213759; TAA
FYSEVLGR

SEQ ID NO: 99414 - protein, 8 aa, Homo sapiens
  Table A; Target 99414; HLA-B*27:02; UGT2B11; ENSG00000213759; TAA
FYSEVLGR

SEQ ID NO: 99415 - protein, 8 aa, Homo sapiens
  Table A; Target 99415; HLA-C*16:01; UGT2B11; ENSG00000213759; TAA
GAAVRLDF

SEQ ID NO: 99416 - protein, 8 aa, Homo sapiens
  Table A; Target 99416; HLA-B*56:01; UGT2B11; ENSG00000213759; TAA
GANGIYEA

SEQ ID NO: 99417 - protein, 9 aa, Homo sapiens
  Table A; Target 99417; HLA-A*68:02; UGT2B11; ENSG00000213759; TAA
GANGIYEAI

SEQ ID NO: 99418 - protein, 9 aa, Homo sapiens
  Table A; Target 99418; HLA-B*13:02; UGT2B11; ENSG00000213759; TAA
GANGIYEAI

SEQ ID NO: 99419 - protein, 9 aa, Homo sapiens
  Table A; Target 99419; HLA-B*27:05; UGT2B11; ENSG00000213759; TAA
GANGIYEAI

SEQ ID NO: 99420 - protein, 9 aa, Homo sapiens
  Table A; Target 99420; HLA-B*35:03; UGT2B11; ENSG00000213759; TAA
GANGIYEAI

SEQ ID NO: 99421 - protein, 9 aa, Homo sapiens
  Table A; Target 99421; HLA-B*38:01; UGT2B11; ENSG00000213759; TAA
GANGIYEAI

SEQ ID NO: 99422 - protein, 9 aa, Homo sapiens
  Table A; Target 99422; HLA-B*46:01; UGT2B11; ENSG00000213759; TAA
GANGIYEAI

SEQ ID NO: 99423 - protein, 9 aa, Homo sapiens
  Table A; Target 99423; HLA-B*58:01; UGT2B11; ENSG00000213759; TAA
GANGIYEAI

SEQ ID NO: 99424 - protein, 9 aa, Homo sapiens
  Table A; Target 99424; HLA-C*01:02; UGT2B11; ENSG00000213759; TAA
GANGIYEAI

SEQ ID NO: 99425 - protein, 9 aa, Homo sapiens
  Table A; Target 99425; HLA-C*02:02; UGT2B11; ENSG00000213759; TAA
GANGIYEAI

SEQ ID NO: 99426 - protein, 9 aa, Homo sapiens
  Table A; Target 99426; HLA-C*03:03; UGT2B11; ENSG00000213759; TAA
GANGIYEAI

SEQ ID NO: 99427 - protein, 9 aa, Homo sapiens
  Table A; Target 99427; HLA-C*03:04; UGT2B11; ENSG00000213759; TAA
GANGIYEAI

SEQ ID NO: 99428 - protein, 9 aa, Homo sapiens
  Table A; Target 99428; HLA-C*12:03; UGT2B11; ENSG00000213759; TAA
GANGIYEAI

SEQ ID NO: 99429 - protein, 9 aa, Homo sapiens
  Table A; Target 99429; HLA-C*16:02; UGT2B11; ENSG00000213759; TAA
GANGIYEAI

SEQ ID NO: 99430 - protein, 9 aa, Homo sapiens
  Table A; Target 99430; HLA-C*16:04; UGT2B11; ENSG00000213759; TAA
GANGIYEAI

SEQ ID NO: 99431 - protein, 10 aa, Homo sapiens
  Table A; Target 99431; HLA-A*29:02; UGT2B11; ENSG00000213759; TAA
GANGIYEAIY

SEQ ID NO: 99432 - protein, 10 aa, Homo sapiens
  Table A; Target 99432; HLA-A*30:02; UGT2B11; ENSG00000213759; TAA
GANGIYEAIY

SEQ ID NO: 99433 - protein, 10 aa, Homo sapiens
  Table A; Target 99433; HLA-B*15:01; UGT2B11; ENSG00000213759; TAA
GANGIYEAIY

SEQ ID NO: 99434 - protein, 8 aa, Homo sapiens
  Table A; Target 99434; HLA-A*30:01; UGT2B11; ENSG00000213759; TAA
GELLAALL

SEQ ID NO: 99435 - protein, 8 aa, Homo sapiens
  Table A; Target 99435; HLA-B*18:01; UGT2B11; ENSG00000213759; TAA
GELLAALL

SEQ ID NO: 99436 - protein, 8 aa, Homo sapiens
  Table A; Target 99436; HLA-B*37:01; UGT2B11; ENSG00000213759; TAA
GELLAALL

SEQ ID NO: 99437 - protein, 8 aa, Homo sapiens
  Table A; Target 99437; HLA-B*40:01; UGT2B11; ENSG00000213759; TAA
GELLAALL

SEQ ID NO: 99438 - protein, 8 aa, Homo sapiens
  Table A; Target 99438; HLA-B*49:01; UGT2B11; ENSG00000213759; TAA
GELLAALL

SEQ ID NO: 99439 - protein, 10 aa, Homo sapiens
  Table A; Target 99439; HLA-B*49:01; UGT2B11; ENSG00000213759; TAA
GELLAALLNI

SEQ ID NO: 99440 - protein, 8 aa, Homo sapiens
  Table A; Target 99440; HLA-A*30:01; UGT2B11; ENSG00000213759; TAA
GENGVVVF

SEQ ID NO: 99441 - protein, 8 aa, Homo sapiens
  Table A; Target 99441; HLA-B*15:01; UGT2B11; ENSG00000213759; TAA
GENGVVVF

SEQ ID NO: 99442 - protein, 8 aa, Homo sapiens
  Table A; Target 99442; HLA-B*15:03; UGT2B11; ENSG00000213759; TAA
GENGVVVF

SEQ ID NO: 99443 - protein, 8 aa, Homo sapiens
  Table A; Target 99443; HLA-B*18:01; UGT2B11; ENSG00000213759; TAA
GENGVVVF

SEQ ID NO: 99444 - protein, 8 aa, Homo sapiens
  Table A; Target 99444; HLA-B*37:01; UGT2B11; ENSG00000213759; TAA
GENGVVVF

SEQ ID NO: 99445 - protein, 8 aa, Homo sapiens
  Table A; Target 99445; HLA-B*39:01; UGT2B11; ENSG00000213759; TAA
GENGVVVF

SEQ ID NO: 99446 - protein, 8 aa, Homo sapiens
  Table A; Target 99446; HLA-B*40:01; UGT2B11; ENSG00000213759; TAA
GENGVVVF

SEQ ID NO: 99447 - protein, 8 aa, Homo sapiens
  Table A; Target 99447; HLA-B*40:02; UGT2B11; ENSG00000213759; TAA
GENGVVVF

SEQ ID NO: 99448 - protein, 8 aa, Homo sapiens
  Table A; Target 99448; HLA-B*44:02; UGT2B11; ENSG00000213759; TAA
GENGVVVF

SEQ ID NO: 99449 - protein, 8 aa, Homo sapiens
  Table A; Target 99449; HLA-B*44:03; UGT2B11; ENSG00000213759; TAA
GENGVVVF

SEQ ID NO: 99450 - protein, 8 aa, Homo sapiens
  Table A; Target 99450; HLA-B*49:01; UGT2B11; ENSG00000213759; TAA
GENGVVVF

SEQ ID NO: 99451 - protein, 8 aa, Homo sapiens
  Table A; Target 99451; HLA-C*04:01; UGT2B11; ENSG00000213759; TAA
GENGVVVF

SEQ ID NO: 99452 - protein, 8 aa, Homo sapiens
  Table A; Target 99452; HLA-C*07:04; UGT2B11; ENSG00000213759; TAA
GENGVVVF

SEQ ID NO: 99453 - protein, 8 aa, Homo sapiens
  Table A; Target 99453; HLA-C*16:04; UGT2B11; ENSG00000213759; TAA
GENGVVVF

SEQ ID NO: 99454 - protein, 9 aa, Homo sapiens
  Table A; Target 99454; HLA-B*27:05; UGT2B11; ENSG00000213759; TAA
GENGVVVFS

SEQ ID NO: 99455 - protein, 9 aa, Homo sapiens
  Table A; Target 99455; HLA-B*49:01; UGT2B11; ENSG00000213759; TAA
GENGVVVFS

SEQ ID NO: 99456 - protein, 10 aa, Homo sapiens
  Table A; Target 99456; HLA-A*30:01; UGT2B11; ENSG00000213759; TAA
GENGVVVFSL

SEQ ID NO: 99457 - protein, 10 aa, Homo sapiens
  Table A; Target 99457; HLA-B*18:01; UGT2B11; ENSG00000213759; TAA
GENGVVVFSL

SEQ ID NO: 99458 - protein, 10 aa, Homo sapiens
  Table A; Target 99458; HLA-B*40:01; UGT2B11; ENSG00000213759; TAA
GENGVVVFSL

SEQ ID NO: 99459 - protein, 10 aa, Homo sapiens
  Table A; Target 99459; HLA-B*40:02; UGT2B11; ENSG00000213759; TAA
GENGVVVFSL

SEQ ID NO: 99460 - protein, 10 aa, Homo sapiens
  Table A; Target 99460; HLA-B*44:02; UGT2B11; ENSG00000213759; TAA
GENGVVVFSL

SEQ ID NO: 99461 - protein, 10 aa, Homo sapiens
  Table A; Target 99461; HLA-B*44:03; UGT2B11; ENSG00000213759; TAA
GENGVVVFSL

SEQ ID NO: 99462 - protein, 10 aa, Homo sapiens
  Table A; Target 99462; HLA-B*49:01; UGT2B11; ENSG00000213759; TAA
GENGVVVFSL

SEQ ID NO: 99463 - protein, 9 aa, Homo sapiens
  Table A; Target 99463; HLA-A*02:01; UGT2B11; ENSG00000213759; TAA
GGANGIYEA

SEQ ID NO: 99464 - protein, 10 aa, Homo sapiens
  Table A; Target 99464; HLA-B*27:02; UGT2B11; ENSG00000213759; TAA
GGANGIYEAI

SEQ ID NO: 99465 - protein, 10 aa, Homo sapiens
  Table A; Target 99465; HLA-B*27:05; UGT2B11; ENSG00000213759; TAA
GGANGIYEAI

SEQ ID NO: 99466 - protein, 11 aa, Homo sapiens
  Table A; Target 99466; HLA-A*30:02; UGT2B11; ENSG00000213759; TAA
GGANGIYEAIY

SEQ ID NO: 99467 - protein, 9 aa, Homo sapiens
  Table A; Target 99467; HLA-A*30:02; UGT2B11; ENSG00000213759; TAA
GGLIFPPSY

SEQ ID NO: 99468 - protein, 9 aa, Homo sapiens
  Table A; Target 99468; HLA-B*15:03; UGT2B11; ENSG00000213759; TAA
GGLIFPPSY

SEQ ID NO: 99469 - protein, 9 aa, Homo sapiens
  Table A; Target 99469; HLA-C*01:02; UGT2B11; ENSG00000213759; TAA
GIPMVGIPL

SEQ ID NO: 99470 - protein, 8 aa, Homo sapiens
  Table A; Target 99470; HLA-A*03:01; UGT2B11; ENSG00000213759; TAA
GIYEAIYH

SEQ ID NO: 99471 - protein, 10 aa, Homo sapiens
  Table A; Target 99471; HLA-A*02:07; UGT2B11; ENSG00000213759; TAA
GIYEAIYHGI

SEQ ID NO: 99472 - protein, 10 aa, Homo sapiens
  Table A; Target 99472; HLA-B*15:03; UGT2B11; ENSG00000213759; TAA
GKVLVWAAEY

SEQ ID NO: 99473 - protein, 8 aa, Homo sapiens
  Table A; Target 99473; HLA-A*30:02; UGT2B11; ENSG00000213759; TAA
GLIFPPSY

SEQ ID NO: 99474 - protein, 9 aa, Homo sapiens
  Table A; Target 99474; HLA-A*02:03; UGT2B11; ENSG00000213759; TAA
GLIFPPSYI

SEQ ID NO: 99475 - protein, 9 aa, Homo sapiens
  Table A; Target 99475; HLA-A*02:04; UGT2B11; ENSG00000213759; TAA
GLIFPPSYI

SEQ ID NO: 99476 - protein, 9 aa, Homo sapiens
  Table A; Target 99476; HLA-B*13:02; UGT2B11; ENSG00000213759; TAA
GLIFPPSYI

SEQ ID NO: 99477 - protein, 9 aa, Homo sapiens
  Table A; Target 99477; HLA-A*29:02; UGT2B11; ENSG00000213759; TAA
GNKPDALGL

SEQ ID NO: 99478 - protein, 9 aa, Homo sapiens
  Table A; Target 99478; HLA-B*40:02; UGT2B11; ENSG00000213759; TAA
GNKPDALGL

SEQ ID NO: 99479 - protein, 9 aa, Homo sapiens
  Table A; Target 99479; HLA-C*07:02; UGT2B11; ENSG00000213759; TAA
GNKPDALGL

SEQ ID NO: 99480 - protein, 10 aa, Homo sapiens
  Table A; Target 99480; HLA-B*27:05; UGT2B11; ENSG00000213759; TAA
GRPTTLFETM

SEQ ID NO: 99481 - protein, 9 aa, Homo sapiens
  Table A; Target 99481; HLA-A*25:01; UGT2B11; ENSG00000213759; TAA
GSCGKVLVW

SEQ ID NO: 99482 - protein, 9 aa, Homo sapiens
  Table A; Target 99482; HLA-B*57:01; UGT2B11; ENSG00000213759; TAA
GSCGKVLVW

SEQ ID NO: 99483 - protein, 9 aa, Homo sapiens
  Table A; Target 99483; HLA-B*58:01; UGT2B11; ENSG00000213759; TAA
GSCGKVLVW

SEQ ID NO: 99484 - protein, 9 aa, Homo sapiens
  Table A; Target 99484; HLA-C*12:03; UGT2B11; ENSG00000213759; TAA
GSCGKVLVW

SEQ ID NO: 99485 - protein, 9 aa, Homo sapiens
  Table A; Target 99485; HLA-B*58:01; UGT2B11; ENSG00000213759; TAA
GSVISNMTA

SEQ ID NO: 99486 - protein, 11 aa, Homo sapiens
  Table A; Target 99486; HLA-B*27:02; UGT2B11; ENSG00000213759; TAA
GSVISNMTAER

SEQ ID NO: 99487 - protein, 11 aa, Homo sapiens
  Table A; Target 99487; HLA-C*07:06; UGT2B11; ENSG00000213759; TAA
GSVISNMTAER

SEQ ID NO: 99488 - protein, 10 aa, Homo sapiens
  Table A; Target 99488; HLA-A*03:01; UGT2B11; ENSG00000213759; TAA
HCKPAKPLPK

SEQ ID NO: 99489 - protein, 8 aa, Homo sapiens
  Table A; Target 99489; HLA-B*37:01; UGT2B11; ENSG00000213759; TAA
HDQPVKPL

SEQ ID NO: 99490 - protein, 8 aa, Homo sapiens
  Table A; Target 99490; HLA-B*18:01; UGT2B11; ENSG00000213759; TAA
HEVTVLAS

SEQ ID NO: 99491 - protein, 9 aa, Homo sapiens
  Table A; Target 99491; HLA-B*18:01; UGT2B11; ENSG00000213759; TAA
HEVTVLASS

SEQ ID NO: 99492 - protein, 9 aa, Homo sapiens
  Table A; Target 99492; HLA-B*40:02; UGT2B11; ENSG00000213759; TAA
HEVTVLASS

SEQ ID NO: 99493 - protein, 10 aa, Homo sapiens
  Table A; Target 99493; HLA-A*30:01; UGT2B11; ENSG00000213759; TAA
HEVTVLASSA

SEQ ID NO: 99494 - protein, 10 aa, Homo sapiens
  Table A; Target 99494; HLA-B*18:01; UGT2B11; ENSG00000213759; TAA
HEVTVLASSA

SEQ ID NO: 99495 - protein, 10 aa, Homo sapiens
  Table A; Target 99495; HLA-B*40:01; UGT2B11; ENSG00000213759; TAA
HEVTVLASSA

SEQ ID NO: 99496 - protein, 10 aa, Homo sapiens
  Table A; Target 99496; HLA-B*40:02; UGT2B11; ENSG00000213759; TAA
HEVTVLASSA

SEQ ID NO: 99497 - protein, 10 aa, Homo sapiens
  Table A; Target 99497; HLA-B*49:01; UGT2B11; ENSG00000213759; TAA
HEVTVLASSA

SEQ ID NO: 99498 - protein, 8 aa, Homo sapiens
  Table A; Target 99498; HLA-C*07:01; UGT2B11; ENSG00000213759; TAA
HGGANGIY

SEQ ID NO: 99499 - protein, 8 aa, Homo sapiens
  Table A; Target 99499; HLA-C*12:03; UGT2B11; ENSG00000213759; TAA
HGGANGIY

SEQ ID NO: 99500 - protein, 8 aa, Homo sapiens
  Table A; Target 99500; HLA-B*51:01; UGT2B11; ENSG00000213759; TAA
HGIPMVGI

SEQ ID NO: 99501 - protein, 9 aa, Homo sapiens
  Table A; Target 99501; HLA-A*02:03; UGT2B11; ENSG00000213759; TAA
HMKAKGAAV

SEQ ID NO: 99502 - protein, 9 aa, Homo sapiens
  Table A; Target 99502; HLA-B*08:01; UGT2B11; ENSG00000213759; TAA
HMKAKGAAV

SEQ ID NO: 99503 - protein, 10 aa, Homo sapiens
  Table A; Target 99503; HLA-A*33:01; UGT2B11; ENSG00000213759; TAA
HMKAKGAAVR

SEQ ID NO: 99504 - protein, 9 aa, Homo sapiens
  Table A; Target 99504; HLA-B*35:01; UGT2B11; ENSG00000213759; TAA
HPFLPNVDF

SEQ ID NO: 99505 - protein, 9 aa, Homo sapiens
  Table A; Target 99505; HLA-B*35:03; UGT2B11; ENSG00000213759; TAA
HPFLPNVDF

SEQ ID NO: 99506 - protein, 9 aa, Homo sapiens
  Table A; Target 99506; HLA-B*54:01; UGT2B11; ENSG00000213759; TAA
HPFLPNVDF

SEQ ID NO: 99507 - protein, 9 aa, Homo sapiens
  Table A; Target 99507; HLA-B*55:01; UGT2B11; ENSG00000213759; TAA
HPFLPNVDF

SEQ ID NO: 99508 - protein, 10 aa, Homo sapiens
  Table A; Target 99508; HLA-B*54:01; UGT2B11; ENSG00000213759; TAA
HPFLPNVDFV

SEQ ID NO: 99509 - protein, 10 aa, Homo sapiens
  Table A; Target 99509; HLA-B*56:01; UGT2B11; ENSG00000213759; TAA
HPFLPNVDFV

SEQ ID NO: 99510 - protein, 8 aa, Homo sapiens
  Table A; Target 99510; HLA-B*08:01; UGT2B11; ENSG00000213759; TAA
HPKTRAFI

SEQ ID NO: 99511 - protein, 8 aa, Homo sapiens
  Table A; Target 99511; HLA-B*57:01; UGT2B11; ENSG00000213759; TAA
HSLDVIGF

SEQ ID NO: 99512 - protein, 8 aa, Homo sapiens
  Table A; Target 99512; HLA-B*58:01; UGT2B11; ENSG00000213759; TAA
HSLDVIGF

SEQ ID NO: 99513 - protein, 8 aa, Homo sapiens
  Table A; Target 99513; HLA-C*07:04; UGT2B11; ENSG00000213759; TAA
HSLDVIGF

SEQ ID NO: 99514 - protein, 9 aa, Homo sapiens
  Table A; Target 99514; HLA-A*02:04; UGT2B11; ENSG00000213759; TAA
HSLDVIGFL

SEQ ID NO: 99515 - protein, 9 aa, Homo sapiens
  Table A; Target 99515; HLA-A*68:02; UGT2B11; ENSG00000213759; TAA
HSLDVIGFL

SEQ ID NO: 99516 - protein, 9 aa, Homo sapiens
  Table A; Target 99516; HLA-B*57:01; UGT2B11; ENSG00000213759; TAA
HSLDVIGFL

SEQ ID NO: 99517 - protein, 10 aa, Homo sapiens
  Table A; Target 99517; HLA-A*02:04; UGT2B11; ENSG00000213759; TAA
HSLDVIGFLL

SEQ ID NO: 99518 - protein, 10 aa, Homo sapiens
  Table A; Target 99518; HLA-A*68:02; UGT2B11; ENSG00000213759; TAA
HSLDVIGFLL

SEQ ID NO: 99519 - protein, 10 aa, Homo sapiens
  Table A; Target 99519; HLA-B*57:01; UGT2B11; ENSG00000213759; TAA
HSLDVIGFLL

SEQ ID NO: 99520 - protein, 11 aa, Homo sapiens
  Table A; Target 99520; HLA-B*54:01; UGT2B11; ENSG00000213759; TAA
HSLDVIGFLLA

SEQ ID NO: 99521 - protein, 8 aa, Homo sapiens
  Table A; Target 99521; HLA-B*51:01; UGT2B11; ENSG00000213759; TAA
IATALAKI

SEQ ID NO: 99522 - protein, 8 aa, Homo sapiens
  Table A; Target 99522; HLA-B*58:01; UGT2B11; ENSG00000213759; TAA
IATALAKI

SEQ ID NO: 99523 - protein, 8 aa, Homo sapiens
  Table A; Target 99523; HLA-C*16:02; UGT2B11; ENSG00000213759; TAA
IATALAKI

SEQ ID NO: 99524 - protein, 9 aa, Homo sapiens
  Table A; Target 99524; HLA-C*16:02; UGT2B11; ENSG00000213759; TAA
IATALAKIP

SEQ ID NO: 99525 - protein, 8 aa, Homo sapiens
  Table A; Target 99525; HLA-B*49:01; UGT2B11; ENSG00000213759; TAA
IEFVMPHK

SEQ ID NO: 99526 - protein, 9 aa, Homo sapiens
  Table A; Target 99526; HLA-B*49:01; UGT2B11; ENSG00000213759; TAA
IEFVMPHKG

SEQ ID NO: 99527 - protein, 10 aa, Homo sapiens
  Table A; Target 99527; HLA-A*24:02; UGT2B11; ENSG00000213759; TAA
IFIITKFCLF

SEQ ID NO: 99528 - protein, 9 aa, Homo sapiens
  Table A; Target 99528; HLA-A*23:01; UGT2B11; ENSG00000213759; TAA
IFPPSYIPI

SEQ ID NO: 99529 - protein, 9 aa, Homo sapiens
  Table A; Target 99529; HLA-A*24:02; UGT2B11; ENSG00000213759; TAA
IFPPSYIPI

SEQ ID NO: 99530 - protein, 11 aa, Homo sapiens
  Table A; Target 99530; HLA-A*23:01; UGT2B11; ENSG00000213759; TAA
IFPPSYIPIVM

SEQ ID NO: 99531 - protein, 11 aa, Homo sapiens
  Table A; Target 99531; HLA-A*24:02; UGT2B11; ENSG00000213759; TAA
IFPPSYIPIVM

SEQ ID NO: 99532 - protein, 8 aa, Homo sapiens
  Table A; Target 99532; HLA-B*51:01; UGT2B11; ENSG00000213759; TAA
IGFLLACV

SEQ ID NO: 99533 - protein, 9 aa, Homo sapiens
  Table A; Target 99533; HLA-B*57:01; UGT2B11; ENSG00000213759; TAA
IIMQQVKRW

SEQ ID NO: 99534 - protein, 10 aa, Homo sapiens
  Table A; Target 99534; HLA-A*02:01; UGT2B11; ENSG00000213759; TAA
ILFDPNDAST

SEQ ID NO: 99535 - protein, 10 aa, Homo sapiens
  Table A; Target 99535; HLA-A*02:03; UGT2B11; ENSG00000213759; TAA
ILFDPNDAST

SEQ ID NO: 99536 - protein, 11 aa, Homo sapiens
  Table A; Target 99536; HLA-A*02:01; UGT2B11; ENSG00000213759; TAA
ILFDPNDASTL

SEQ ID NO: 99537 - protein, 11 aa, Homo sapiens
  Table A; Target 99537; HLA-A*02:03; UGT2B11; ENSG00000213759; TAA
ILFDPNDASTL

SEQ ID NO: 99538 - protein, 11 aa, Homo sapiens
  Table A; Target 99538; HLA-A*02:04; UGT2B11; ENSG00000213759; TAA
ILFDPNDASTL

SEQ ID NO: 99539 - protein, 11 aa, Homo sapiens
  Table A; Target 99539; HLA-A*02:07; UGT2B11; ENSG00000213759; TAA
ILFDPNDASTL

SEQ ID NO: 99540 - protein, 11 aa, Homo sapiens
  Table A; Target 99540; HLA-A*03:01; UGT2B11; ENSG00000213759; TAA
ILFDPNDASTL

SEQ ID NO: 99541 - protein, 11 aa, Homo sapiens
  Table A; Target 99541; HLA-A*03:02; UGT2B11; ENSG00000213759; TAA
ILFDPNDASTL

SEQ ID NO: 99542 - protein, 11 aa, Homo sapiens
  Table A; Target 99542; HLA-A*23:01; UGT2B11; ENSG00000213759; TAA
ILFDPNDASTL

SEQ ID NO: 99543 - protein, 11 aa, Homo sapiens
  Table A; Target 99543; HLA-A*24:02; UGT2B11; ENSG00000213759; TAA
ILFDPNDASTL

SEQ ID NO: 99544 - protein, 11 aa, Homo sapiens
  Table A; Target 99544; HLA-A*25:01; UGT2B11; ENSG00000213759; TAA
ILFDPNDASTL

SEQ ID NO: 99545 - protein, 11 aa, Homo sapiens
  Table A; Target 99545; HLA-A*26:01; UGT2B11; ENSG00000213759; TAA
ILFDPNDASTL

SEQ ID NO: 99546 - protein, 11 aa, Homo sapiens
  Table A; Target 99546; HLA-A*30:01; UGT2B11; ENSG00000213759; TAA
ILFDPNDASTL

SEQ ID NO: 99547 - protein, 11 aa, Homo sapiens
  Table A; Target 99547; HLA-A*31:01; UGT2B11; ENSG00000213759; TAA
ILFDPNDASTL

SEQ ID NO: 99548 - protein, 11 aa, Homo sapiens
  Table A; Target 99548; HLA-A*32:01; UGT2B11; ENSG00000213759; TAA
ILFDPNDASTL

SEQ ID NO: 99549 - protein, 11 aa, Homo sapiens
  Table A; Target 99549; HLA-A*68:02; UGT2B11; ENSG00000213759; TAA
ILFDPNDASTL

SEQ ID NO: 99550 - protein, 11 aa, Homo sapiens
  Table A; Target 99550; HLA-B*13:02; UGT2B11; ENSG00000213759; TAA
ILFDPNDASTL

SEQ ID NO: 99551 - protein, 11 aa, Homo sapiens
  Table A; Target 99551; HLA-B*15:01; UGT2B11; ENSG00000213759; TAA
ILFDPNDASTL

SEQ ID NO: 99552 - protein, 11 aa, Homo sapiens
  Table A; Target 99552; HLA-B*15:03; UGT2B11; ENSG00000213759; TAA
ILFDPNDASTL

SEQ ID NO: 99553 - protein, 11 aa, Homo sapiens
  Table A; Target 99553; HLA-B*27:05; UGT2B11; ENSG00000213759; TAA
ILFDPNDASTL

SEQ ID NO: 99554 - protein, 11 aa, Homo sapiens
  Table A; Target 99554; HLA-B*35:03; UGT2B11; ENSG00000213759; TAA
ILFDPNDASTL

SEQ ID NO: 99555 - protein, 11 aa, Homo sapiens
  Table A; Target 99555; HLA-B*38:01; UGT2B11; ENSG00000213759; TAA
ILFDPNDASTL

SEQ ID NO: 99556 - protein, 11 aa, Homo sapiens
  Table A; Target 99556; HLA-B*39:01; UGT2B11; ENSG00000213759; TAA
ILFDPNDASTL

SEQ ID NO: 99557 - protein, 11 aa, Homo sapiens
  Table A; Target 99557; HLA-B*40:01; UGT2B11; ENSG00000213759; TAA
ILFDPNDASTL

SEQ ID NO: 99558 - protein, 11 aa, Homo sapiens
  Table A; Target 99558; HLA-B*40:02; UGT2B11; ENSG00000213759; TAA
ILFDPNDASTL

SEQ ID NO: 99559 - protein, 11 aa, Homo sapiens
  Table A; Target 99559; HLA-B*46:01; UGT2B11; ENSG00000213759; TAA
ILFDPNDASTL

SEQ ID NO: 99560 - protein, 11 aa, Homo sapiens
  Table A; Target 99560; HLA-B*55:01; UGT2B11; ENSG00000213759; TAA
ILFDPNDASTL

SEQ ID NO: 99561 - protein, 11 aa, Homo sapiens
  Table A; Target 99561; HLA-B*58:01; UGT2B11; ENSG00000213759; TAA
ILFDPNDASTL

SEQ ID NO: 99562 - protein, 11 aa, Homo sapiens
  Table A; Target 99562; HLA-C*01:02; UGT2B11; ENSG00000213759; TAA
ILFDPNDASTL

SEQ ID NO: 99563 - protein, 11 aa, Homo sapiens
  Table A; Target 99563; HLA-C*02:02; UGT2B11; ENSG00000213759; TAA
ILFDPNDASTL

SEQ ID NO: 99564 - protein, 11 aa, Homo sapiens
  Table A; Target 99564; HLA-C*03:03; UGT2B11; ENSG00000213759; TAA
ILFDPNDASTL

SEQ ID NO: 99565 - protein, 11 aa, Homo sapiens
  Table A; Target 99565; HLA-C*03:04; UGT2B11; ENSG00000213759; TAA
ILFDPNDASTL

SEQ ID NO: 99566 - protein, 11 aa, Homo sapiens
  Table A; Target 99566; HLA-C*05:01; UGT2B11; ENSG00000213759; TAA
ILFDPNDASTL

SEQ ID NO: 99567 - protein, 11 aa, Homo sapiens
  Table A; Target 99567; HLA-C*06:02; UGT2B11; ENSG00000213759; TAA
ILFDPNDASTL

SEQ ID NO: 99568 - protein, 11 aa, Homo sapiens
  Table A; Target 99568; HLA-C*07:04; UGT2B11; ENSG00000213759; TAA
ILFDPNDASTL

SEQ ID NO: 99569 - protein, 11 aa, Homo sapiens
  Table A; Target 99569; HLA-C*12:03; UGT2B11; ENSG00000213759; TAA
ILFDPNDASTL

SEQ ID NO: 99570 - protein, 11 aa, Homo sapiens
  Table A; Target 99570; HLA-C*14:02; UGT2B11; ENSG00000213759; TAA
ILFDPNDASTL

SEQ ID NO: 99571 - protein, 11 aa, Homo sapiens
  Table A; Target 99571; HLA-C*16:01; UGT2B11; ENSG00000213759; TAA
ILFDPNDASTL

SEQ ID NO: 99572 - protein, 11 aa, Homo sapiens
  Table A; Target 99572; HLA-C*16:02; UGT2B11; ENSG00000213759; TAA
ILFDPNDASTL

SEQ ID NO: 99573 - protein, 11 aa, Homo sapiens
  Table A; Target 99573; HLA-C*16:04; UGT2B11; ENSG00000213759; TAA
ILFDPNDASTL

SEQ ID NO: 99574 - protein, 8 aa, Homo sapiens
  Table A; Target 99574; HLA-A*31:01; UGT2B11; ENSG00000213759; TAA
ILKELVQR

SEQ ID NO: 99575 - protein, 8 aa, Homo sapiens
  Table A; Target 99575; HLA-A*33:01; UGT2B11; ENSG00000213759; TAA
ILKELVQR

SEQ ID NO: 99576 - protein, 8 aa, Homo sapiens
  Table A; Target 99576; HLA-A*33:03; UGT2B11; ENSG00000213759; TAA
ILKELVQR

SEQ ID NO: 99577 - protein, 9 aa, Homo sapiens
  Table A; Target 99577; HLA-A*02:03; UGT2B11; ENSG00000213759; TAA
ILKELVQRG

SEQ ID NO: 99578 - protein, 9 aa, Homo sapiens
  Table A; Target 99578; HLA-A*02:07; UGT2B11; ENSG00000213759; TAA
ILWELYDIF

SEQ ID NO: 99579 - protein, 8 aa, Homo sapiens
  Table A; Target 99579; HLA-B*07:02; UGT2B11; ENSG00000213759; TAA
IPIVMSKL

SEQ ID NO: 99580 - protein, 8 aa, Homo sapiens
  Table A; Target 99580; HLA-B*08:01; UGT2B11; ENSG00000213759; TAA
IPIVMSKL

SEQ ID NO: 99581 - protein, 8 aa, Homo sapiens
  Table A; Target 99581; HLA-B*35:01; UGT2B11; ENSG00000213759; TAA
IPIVMSKL

SEQ ID NO: 99582 - protein, 8 aa, Homo sapiens
  Table A; Target 99582; HLA-B*35:03; UGT2B11; ENSG00000213759; TAA
IPIVMSKL

SEQ ID NO: 99583 - protein, 8 aa, Homo sapiens
  Table A; Target 99583; HLA-B*51:01; UGT2B11; ENSG00000213759; TAA
IPIVMSKL

SEQ ID NO: 99584 - protein, 8 aa, Homo sapiens
  Table A; Target 99584; HLA-B*56:01; UGT2B11; ENSG00000213759; TAA
IPIVMSKL

SEQ ID NO: 99585 - protein, 8 aa, Homo sapiens
  Table A; Target 99585; HLA-C*07:02; UGT2B11; ENSG00000213759; TAA
IPIVMSKL

SEQ ID NO: 99586 - protein, 8 aa, Homo sapiens
  Table A; Target 99586; HLA-B*07:02; UGT2B11; ENSG00000213759; TAA
IPMVGIPL

SEQ ID NO: 99587 - protein, 8 aa, Homo sapiens
  Table A; Target 99587; HLA-B*08:01; UGT2B11; ENSG00000213759; TAA
IPMVGIPL

SEQ ID NO: 99588 - protein, 8 aa, Homo sapiens
  Table A; Target 99588; HLA-B*35:01; UGT2B11; ENSG00000213759; TAA
IPMVGIPL

SEQ ID NO: 99589 - protein, 8 aa, Homo sapiens
  Table A; Target 99589; HLA-B*35:03; UGT2B11; ENSG00000213759; TAA
IPMVGIPL

SEQ ID NO: 99590 - protein, 8 aa, Homo sapiens
  Table A; Target 99590; HLA-B*51:01; UGT2B11; ENSG00000213759; TAA
IPMVGIPL

SEQ ID NO: 99591 - protein, 8 aa, Homo sapiens
  Table A; Target 99591; HLA-C*07:02; UGT2B11; ENSG00000213759; TAA
IPMVGIPL

SEQ ID NO: 99592 - protein, 9 aa, Homo sapiens
  Table A; Target 99592; HLA-A*23:01; UGT2B11; ENSG00000213759; TAA
IPMVGIPLF

SEQ ID NO: 99593 - protein, 9 aa, Homo sapiens
  Table A; Target 99593; HLA-A*24:02; UGT2B11; ENSG00000213759; TAA
IPMVGIPLF

SEQ ID NO: 99594 - protein, 9 aa, Homo sapiens
  Table A; Target 99594; HLA-B*07:02; UGT2B11; ENSG00000213759; TAA
IPMVGIPLF

SEQ ID NO: 99595 - protein, 9 aa, Homo sapiens
  Table A; Target 99595; HLA-B*35:01; UGT2B11; ENSG00000213759; TAA
IPMVGIPLF

SEQ ID NO: 99596 - protein, 9 aa, Homo sapiens
  Table A; Target 99596; HLA-B*35:03; UGT2B11; ENSG00000213759; TAA
IPMVGIPLF

SEQ ID NO: 99597 - protein, 9 aa, Homo sapiens
  Table A; Target 99597; HLA-B*51:01; UGT2B11; ENSG00000213759; TAA
IPMVGIPLF

SEQ ID NO: 99598 - protein, 9 aa, Homo sapiens
  Table A; Target 99598; HLA-B*54:01; UGT2B11; ENSG00000213759; TAA
IPMVGIPLF

SEQ ID NO: 99599 - protein, 9 aa, Homo sapiens
  Table A; Target 99599; HLA-B*55:01; UGT2B11; ENSG00000213759; TAA
IPMVGIPLF

SEQ ID NO: 99600 - protein, 9 aa, Homo sapiens
  Table A; Target 99600; HLA-B*56:01; UGT2B11; ENSG00000213759; TAA
IPMVGIPLF

SEQ ID NO: 99601 - protein, 9 aa, Homo sapiens
  Table A; Target 99601; HLA-A*24:02; UGT2B11; ENSG00000213759; TAA
IPQKVLWRF

SEQ ID NO: 99602 - protein, 9 aa, Homo sapiens
  Table A; Target 99602; HLA-B*35:01; UGT2B11; ENSG00000213759; TAA
IPQNDLLGH

SEQ ID NO: 99603 - protein, 9 aa, Homo sapiens
  Table A; Target 99603; HLA-B*55:01; UGT2B11; ENSG00000213759; TAA
IPQNDLLGH

SEQ ID NO: 99604 - protein, 11 aa, Homo sapiens
  Table A; Target 99604; HLA-A*03:02; UGT2B11; ENSG00000213759; TAA
IPQNDLLGHPK

SEQ ID NO: 99605 - protein, 11 aa, Homo sapiens
  Table A; Target 99605; HLA-A*11:01; UGT2B11; ENSG00000213759; TAA
IPQNDLLGHPK

SEQ ID NO: 99606 - protein, 11 aa, Homo sapiens
  Table A; Target 99606; HLA-A*31:01; UGT2B11; ENSG00000213759; TAA
IPQNDLLGHPK

SEQ ID NO: 99607 - protein, 11 aa, Homo sapiens
  Table A; Target 99607; HLA-A*33:01; UGT2B11; ENSG00000213759; TAA
IPQNDLLGHPK

SEQ ID NO: 99608 - protein, 11 aa, Homo sapiens
  Table A; Target 99608; HLA-A*68:01; UGT2B11; ENSG00000213759; TAA
IPQNDLLGHPK

SEQ ID NO: 99609 - protein, 11 aa, Homo sapiens
  Table A; Target 99609; HLA-B*27:02; UGT2B11; ENSG00000213759; TAA
IPQNDLLGHPK

SEQ ID NO: 99610 - protein, 11 aa, Homo sapiens
  Table A; Target 99610; HLA-B*54:01; UGT2B11; ENSG00000213759; TAA
IPQNDLLGHPK

SEQ ID NO: 99611 - protein, 11 aa, Homo sapiens
  Table A; Target 99611; HLA-B*56:01; UGT2B11; ENSG00000213759; TAA
IPQNDLLGHPK

SEQ ID NO: 99612 - protein, 11 aa, Homo sapiens
  Table A; Target 99612; HLA-C*04:01; UGT2B11; ENSG00000213759; TAA
IPQNDLLGHPK

SEQ ID NO: 99613 - protein, 11 aa, Homo sapiens
  Table A; Target 99613; HLA-C*07:06; UGT2B11; ENSG00000213759; TAA
IPQNDLLGHPK

SEQ ID NO: 99614 - protein, 8 aa, Homo sapiens
  Table A; Target 99614; HLA-B*15:03; UGT2B11; ENSG00000213759; TAA
IQHDQPVK

SEQ ID NO: 99615 - protein, 8 aa, Homo sapiens
  Table A; Target 99615; HLA-B*27:05; UGT2B11; ENSG00000213759; TAA
IQHDQPVK

SEQ ID NO: 99616 - protein, 8 aa, Homo sapiens
  Table A; Target 99616; HLA-B*39:01; UGT2B11; ENSG00000213759; TAA
IQHDQPVK

SEQ ID NO: 99617 - protein, 8 aa, Homo sapiens
  Table A; Target 99617; HLA-C*06:02; UGT2B11; ENSG00000213759; TAA
IQHDQPVK

SEQ ID NO: 99618 - protein, 8 aa, Homo sapiens
  Table A; Target 99618; HLA-C*16:01; UGT2B11; ENSG00000213759; TAA
IQHDQPVK

SEQ ID NO: 99619 - protein, 9 aa, Homo sapiens
  Table A; Target 99619; HLA-B*13:02; UGT2B11; ENSG00000213759; TAA
IQHDQPVKP

SEQ ID NO: 99620 - protein, 9 aa, Homo sapiens
  Table A; Target 99620; HLA-B*27:05; UGT2B11; ENSG00000213759; TAA
IQHDQPVKP

SEQ ID NO: 99621 - protein, 9 aa, Homo sapiens
  Table A; Target 99621; HLA-C*06:02; UGT2B11; ENSG00000213759; TAA
IQHDQPVKP

SEQ ID NO: 99622 - protein, 9 aa, Homo sapiens
  Table A; Target 99622; HLA-C*07:04; UGT2B11; ENSG00000213759; TAA
IQHDQPVKP

SEQ ID NO: 99623 - protein, 10 aa, Homo sapiens
  Table A; Target 99623; HLA-A*02:03; UGT2B11; ENSG00000213759; TAA
IQHDQPVKPL

SEQ ID NO: 99624 - protein, 8 aa, Homo sapiens
  Table A; Target 99624; HLA-A*31:01; UGT2B11; ENSG00000213759; TAA
ISNMTAER

SEQ ID NO: 99625 - protein, 8 aa, Homo sapiens
  Table A; Target 99625; HLA-A*33:01; UGT2B11; ENSG00000213759; TAA
ISNMTAER

SEQ ID NO: 99626 - protein, 8 aa, Homo sapiens
  Table A; Target 99626; HLA-A*33:03; UGT2B11; ENSG00000213759; TAA
ISNMTAER

SEQ ID NO: 99627 - protein, 8 aa, Homo sapiens
  Table A; Target 99627; HLA-C*07:06; UGT2B11; ENSG00000213759; TAA
ISNMTAER

SEQ ID NO: 99628 - protein, 9 aa, Homo sapiens
  Table A; Target 99628; HLA-A*32:01; UGT2B11; ENSG00000213759; TAA
ITHGGANGI

SEQ ID NO: 99629 - protein, 9 aa, Homo sapiens
  Table A; Target 99629; HLA-B*13:02; UGT2B11; ENSG00000213759; TAA
ITHGGANGI

SEQ ID NO: 99630 - protein, 9 aa, Homo sapiens
  Table A; Target 99630; HLA-C*01:02; UGT2B11; ENSG00000213759; TAA
ITHGGANGI

SEQ ID NO: 99631 - protein, 9 aa, Homo sapiens
  Table A; Target 99631; HLA-C*16:02; UGT2B11; ENSG00000213759; TAA
ITHGGANGI

SEQ ID NO: 99632 - protein, 10 aa, Homo sapiens
  Table A; Target 99632; HLA-A*01:01; UGT2B11; ENSG00000213759; TAA
ITHGGANGIY

SEQ ID NO: 99633 - protein, 10 aa, Homo sapiens
  Table A; Target 99633; HLA-A*26:01; UGT2B11; ENSG00000213759; TAA
ITHGGANGIY

SEQ ID NO: 99634 - protein, 10 aa, Homo sapiens
  Table A; Target 99634; HLA-A*29:02; UGT2B11; ENSG00000213759; TAA
ITHGGANGIY

SEQ ID NO: 99635 - protein, 10 aa, Homo sapiens
  Table A; Target 99635; HLA-A*30:02; UGT2B11; ENSG00000213759; TAA
ITHGGANGIY

SEQ ID NO: 99636 - protein, 10 aa, Homo sapiens
  Table A; Target 99636; HLA-A*32:01; UGT2B11; ENSG00000213759; TAA
ITHGGANGIY

SEQ ID NO: 99637 - protein, 10 aa, Homo sapiens
  Table A; Target 99637; HLA-B*15:01; UGT2B11; ENSG00000213759; TAA
ITHGGANGIY

SEQ ID NO: 99638 - protein, 10 aa, Homo sapiens
  Table A; Target 99638; HLA-B*46:01; UGT2B11; ENSG00000213759; TAA
ITHGGANGIY

SEQ ID NO: 99639 - protein, 10 aa, Homo sapiens
  Table A; Target 99639; HLA-C*01:02; UGT2B11; ENSG00000213759; TAA
ITHGGANGIY

SEQ ID NO: 99640 - protein, 10 aa, Homo sapiens
  Table A; Target 99640; HLA-C*07:01; UGT2B11; ENSG00000213759; TAA
ITHGGANGIY

SEQ ID NO: 99641 - protein, 10 aa, Homo sapiens
  Table A; Target 99641; HLA-C*07:04; UGT2B11; ENSG00000213759; TAA
ITHGGANGIY

SEQ ID NO: 99642 - protein, 10 aa, Homo sapiens
  Table A; Target 99642; HLA-C*14:02; UGT2B11; ENSG00000213759; TAA
ITHGGANGIY

SEQ ID NO: 99643 - protein, 9 aa, Homo sapiens
  Table A; Target 99643; HLA-A*23:01; UGT2B11; ENSG00000213759; TAA
IYEAIYHGI

SEQ ID NO: 99644 - protein, 9 aa, Homo sapiens
  Table A; Target 99644; HLA-A*24:02; UGT2B11; ENSG00000213759; TAA
IYEAIYHGI

SEQ ID NO: 99645 - protein, 8 aa, Homo sapiens
  Table A; Target 99645; HLA-C*04:01; UGT2B11; ENSG00000213759; TAA
IYHGIPMV

SEQ ID NO: 99646 - protein, 8 aa, Homo sapiens
  Table A; Target 99646; HLA-C*06:02; UGT2B11; ENSG00000213759; TAA
IYHGIPMV

SEQ ID NO: 99647 - protein, 8 aa, Homo sapiens
  Table A; Target 99647; HLA-C*07:02; UGT2B11; ENSG00000213759; TAA
IYHGIPMV

SEQ ID NO: 99648 - protein, 9 aa, Homo sapiens
  Table A; Target 99648; HLA-A*24:02; UGT2B11; ENSG00000213759; TAA
IYHGIPMVG

SEQ ID NO: 99649 - protein, 10 aa, Homo sapiens
  Table A; Target 99649; HLA-A*23:01; UGT2B11; ENSG00000213759; TAA
IYHGIPMVGI

SEQ ID NO: 99650 - protein, 10 aa, Homo sapiens
  Table A; Target 99650; HLA-A*24:02; UGT2B11; ENSG00000213759; TAA
IYHGIPMVGI

SEQ ID NO: 99651 - protein, 9 aa, Homo sapiens
  Table A; Target 99651; HLA-A*24:02; UGT2B11; ENSG00000213759; TAA
IYVLYFDFW

SEQ ID NO: 99652 - protein, 9 aa, Homo sapiens
  Table A; Target 99652; HLA-A*31:01; UGT2B11; ENSG00000213759; TAA
KAKGAAVRL

SEQ ID NO: 99653 - protein, 9 aa, Homo sapiens
  Table A; Target 99653; HLA-B*07:02; UGT2B11; ENSG00000213759; TAA
KAKGAAVRL

SEQ ID NO: 99654 - protein, 9 aa, Homo sapiens
  Table A; Target 99654; HLA-C*06:02; UGT2B11; ENSG00000213759; TAA
KAKGAAVRL

SEQ ID NO: 99655 - protein, 9 aa, Homo sapiens
  Table A; Target 99655; HLA-C*12:03; UGT2B11; ENSG00000213759; TAA
KAKGAAVRL

SEQ ID NO: 99656 - protein, 9 aa, Homo sapiens
  Table A; Target 99656; HLA-C*16:02; UGT2B11; ENSG00000213759; TAA
KAKGAAVRL

SEQ ID NO: 99657 - protein, 11 aa, Homo sapiens
  Table A; Target 99657; HLA-B*57:01; UGT2B11; ENSG00000213759; TAA
KAKGAAVRLDF

SEQ ID NO: 99658 - protein, 8 aa, Homo sapiens
  Table A; Target 99658; HLA-B*37:01; UGT2B11; ENSG00000213759; TAA
KDVVSNKK

SEQ ID NO: 99659 - protein, 8 aa, Homo sapiens
  Table A; Target 99659; HLA-C*06:02; UGT2B11; ENSG00000213759; TAA
KDVVSNKK

SEQ ID NO: 99660 - protein, 9 aa, Homo sapiens
  Table A; Target 99660; HLA-B*40:02; UGT2B11; ENSG00000213759; TAA
KDVVSNKKV

SEQ ID NO: 99661 - protein, 9 aa, Homo sapiens
  Table A; Target 99661; HLA-C*06:02; UGT2B11; ENSG00000213759; TAA
KDVVSNKKV

SEQ ID NO: 99662 - protein, 10 aa, Homo sapiens
  Table A; Target 99662; HLA-B*40:02; UGT2B11; ENSG00000213759; TAA
KDVVSNKKVM

SEQ ID NO: 99663 - protein, 10 aa, Homo sapiens
  Table A; Target 99663; HLA-C*04:01; UGT2B11; ENSG00000213759; TAA
KDVVSNKKVM

SEQ ID NO: 99664 - protein, 10 aa, Homo sapiens
  Table A; Target 99664; HLA-B*37:01; UGT2B11; ENSG00000213759; TAA
KELVQRGHEV

SEQ ID NO: 99665 - protein, 9 aa, Homo sapiens
  Table A; Target 99665; HLA-B*49:01; UGT2B11; ENSG00000213759; TAA
KEMEEFVQS

SEQ ID NO: 99666 - protein, 9 aa, Homo sapiens
  Table A; Target 99666; HLA-A*23:01; UGT2B11; ENSG00000213759; TAA
KFEVYPTSL

SEQ ID NO: 99667 - protein, 9 aa, Homo sapiens
  Table A; Target 99667; HLA-B*35:03; UGT2B11; ENSG00000213759; TAA
KFEVYPTSL

SEQ ID NO: 99668 - protein, 9 aa, Homo sapiens
  Table A; Target 99668; HLA-B*37:01; UGT2B11; ENSG00000213759; TAA
KFEVYPTSL

SEQ ID NO: 99669 - protein, 9 aa, Homo sapiens
  Table A; Target 99669; HLA-B*40:01; UGT2B11; ENSG00000213759; TAA
KFEVYPTSL

SEQ ID NO: 99670 - protein, 9 aa, Homo sapiens
  Table A; Target 99670; HLA-B*40:02; UGT2B11; ENSG00000213759; TAA
KFEVYPTSL

SEQ ID NO: 99671 - protein, 9 aa, Homo sapiens
  Table A; Target 99671; HLA-B*55:01; UGT2B11; ENSG00000213759; TAA
KFEVYPTSL

SEQ ID NO: 99672 - protein, 9 aa, Homo sapiens
  Table A; Target 99672; HLA-C*01:02; UGT2B11; ENSG00000213759; TAA
KFEVYPTSL

SEQ ID NO: 99673 - protein, 9 aa, Homo sapiens
  Table A; Target 99673; HLA-C*04:01; UGT2B11; ENSG00000213759; TAA
KFEVYPTSL

SEQ ID NO: 99674 - protein, 9 aa, Homo sapiens
  Table A; Target 99674; HLA-C*07:02; UGT2B11; ENSG00000213759; TAA
KFEVYPTSL

SEQ ID NO: 99675 - protein, 9 aa, Homo sapiens
  Table A; Target 99675; HLA-C*07:04; UGT2B11; ENSG00000213759; TAA
KFEVYPTSL

SEQ ID NO: 99676 - protein, 9 aa, Homo sapiens
  Table A; Target 99676; HLA-C*14:02; UGT2B11; ENSG00000213759; TAA
KFEVYPTSL

SEQ ID NO: 99677 - protein, 9 aa, Homo sapiens
  Table A; Target 99677; HLA-A*32:01; UGT2B11; ENSG00000213759; TAA
KGAAVRLDF

SEQ ID NO: 99678 - protein, 9 aa, Homo sapiens
  Table A; Target 99678; HLA-B*57:01; UGT2B11; ENSG00000213759; TAA
KGAAVRLDF

SEQ ID NO: 99679 - protein, 9 aa, Homo sapiens
  Table A; Target 99679; HLA-B*58:01; UGT2B11; ENSG00000213759; TAA
KGAAVRLDF

SEQ ID NO: 99680 - protein, 9 aa, Homo sapiens
  Table A; Target 99680; HLA-C*16:01; UGT2B11; ENSG00000213759; TAA
KGAAVRLDF

SEQ ID NO: 99681 - protein, 10 aa, Homo sapiens
  Table A; Target 99681; HLA-A*02:07; UGT2B11; ENSG00000213759; TAA
KIPQKVLWRF

SEQ ID NO: 99682 - protein, 10 aa, Homo sapiens
  Table A; Target 99682; HLA-A*02:07; UGT2B11; ENSG00000213759; TAA
KLQESRFDIV

SEQ ID NO: 99683 - protein, 11 aa, Homo sapiens
  Table A; Target 99683; HLA-A*02:07; UGT2B11; ENSG00000213759; TAA
KLQESRFDIVF

SEQ ID NO: 99684 - protein, 8 aa, Homo sapiens
  Table A; Target 99684; HLA-A*32:01; UGT2B11; ENSG00000213759; TAA
KLSDQMTF

SEQ ID NO: 99685 - protein, 8 aa, Homo sapiens
  Table A; Target 99685; HLA-B*37:01; UGT2B11; ENSG00000213759; TAA
KLSDQMTF

SEQ ID NO: 99686 - protein, 8 aa, Homo sapiens
  Table A; Target 99686; HLA-B*58:01; UGT2B11; ENSG00000213759; TAA
KLSDQMTF

SEQ ID NO: 99687 - protein, 9 aa, Homo sapiens
  Table A; Target 99687; HLA-A*02:01; UGT2B11; ENSG00000213759; TAA
KLSDQMTFM

SEQ ID NO: 99688 - protein, 9 aa, Homo sapiens
  Table A; Target 99688; HLA-A*02:03; UGT2B11; ENSG00000213759; TAA
KLSDQMTFM

SEQ ID NO: 99689 - protein, 9 aa, Homo sapiens
  Table A; Target 99689; HLA-A*02:04; UGT2B11; ENSG00000213759; TAA
KLSDQMTFM

SEQ ID NO: 99690 - protein, 9 aa, Homo sapiens
  Table A; Target 99690; HLA-A*02:07; UGT2B11; ENSG00000213759; TAA
KLSDQMTFM

SEQ ID NO: 99691 - protein, 9 aa, Homo sapiens
  Table A; Target 99691; HLA-A*03:01; UGT2B11; ENSG00000213759; TAA
KLSDQMTFM

SEQ ID NO: 99692 - protein, 9 aa, Homo sapiens
  Table A; Target 99692; HLA-A*03:02; UGT2B11; ENSG00000213759; TAA
KLSDQMTFM

SEQ ID NO: 99693 - protein, 9 aa, Homo sapiens
  Table A; Target 99693; HLA-A*32:01; UGT2B11; ENSG00000213759; TAA
KLSDQMTFM

SEQ ID NO: 99694 - protein, 9 aa, Homo sapiens
  Table A; Target 99694; HLA-B*13:02; UGT2B11; ENSG00000213759; TAA
KLSDQMTFM

SEQ ID NO: 99695 - protein, 9 aa, Homo sapiens
  Table A; Target 99695; HLA-B*27:05; UGT2B11; ENSG00000213759; TAA
KLSDQMTFM

SEQ ID NO: 99696 - protein, 9 aa, Homo sapiens
  Table A; Target 99696; HLA-B*46:01; UGT2B11; ENSG00000213759; TAA
KLSDQMTFM

SEQ ID NO: 99697 - protein, 9 aa, Homo sapiens
  Table A; Target 99697; HLA-B*55:01; UGT2B11; ENSG00000213759; TAA
KLSDQMTFM

SEQ ID NO: 99698 - protein, 11 aa, Homo sapiens
  Table A; Target 99698; HLA-A*03:01; UGT2B11; ENSG00000213759; TAA
KLSDQMTFMER

SEQ ID NO: 99699 - protein, 11 aa, Homo sapiens
  Table A; Target 99699; HLA-A*31:01; UGT2B11; ENSG00000213759; TAA
KLSDQMTFMER

SEQ ID NO: 99700 - protein, 10 aa, Homo sapiens
  Table A; Target 99700; HLA-B*07:02; UGT2B11; ENSG00000213759; TAA
KPAKPLPKEM

SEQ ID NO: 99701 - protein, 10 aa, Homo sapiens
  Table A; Target 99701; HLA-C*07:02; UGT2B11; ENSG00000213759; TAA
KPAKPLPKEM

SEQ ID NO: 99702 - protein, 10 aa, Homo sapiens
  Table A; Target 99702; HLA-B*56:01; UGT2B11; ENSG00000213759; TAA
KPDALGLNTR

SEQ ID NO: 99703 - protein, 11 aa, Homo sapiens
  Table A; Target 99703; HLA-B*07:02; UGT2B11; ENSG00000213759; TAA
KPDALGLNTRL

SEQ ID NO: 99704 - protein, 11 aa, Homo sapiens
  Table A; Target 99704; HLA-C*07:02; UGT2B11; ENSG00000213759; TAA
KPDALGLNTRL

SEQ ID NO: 99705 - protein, 10 aa, Homo sapiens
  Table A; Target 99705; HLA-B*35:01; UGT2B11; ENSG00000213759; TAA
KPLPKEMEEF

SEQ ID NO: 99706 - protein, 10 aa, Homo sapiens
  Table A; Target 99706; HLA-A*03:01; UGT2B11; ENSG00000213759; TAA
KTILKELVQR

SEQ ID NO: 99707 - protein, 10 aa, Homo sapiens
  Table A; Target 99707; HLA-A*11:01; UGT2B11; ENSG00000213759; TAA
KTILKELVQR

SEQ ID NO: 99708 - protein, 10 aa, Homo sapiens
  Table A; Target 99708; HLA-A*31:01; UGT2B11; ENSG00000213759; TAA
KTILKELVQR

SEQ ID NO: 99709 - protein, 10 aa, Homo sapiens
  Table A; Target 99709; HLA-A*33:01; UGT2B11; ENSG00000213759; TAA
KTILKELVQR

SEQ ID NO: 99710 - protein, 10 aa, Homo sapiens
  Table A; Target 99710; HLA-A*33:03; UGT2B11; ENSG00000213759; TAA
KTILKELVQR

SEQ ID NO: 99711 - protein, 9 aa, Homo sapiens
  Table A; Target 99711; HLA-A*01:01; UGT2B11; ENSG00000213759; TAA
KTVINDPLY

SEQ ID NO: 99712 - protein, 9 aa, Homo sapiens
  Table A; Target 99712; HLA-A*11:01; UGT2B11; ENSG00000213759; TAA
KTVINDPLY

SEQ ID NO: 99713 - protein, 9 aa, Homo sapiens
  Table A; Target 99713; HLA-A*26:01; UGT2B11; ENSG00000213759; TAA
KTVINDPLY

SEQ ID NO: 99714 - protein, 9 aa, Homo sapiens
  Table A; Target 99714; HLA-A*29:02; UGT2B11; ENSG00000213759; TAA
KTVINDPLY

SEQ ID NO: 99715 - protein, 9 aa, Homo sapiens
  Table A; Target 99715; HLA-A*30:02; UGT2B11; ENSG00000213759; TAA
KTVINDPLY

SEQ ID NO: 99716 - protein, 9 aa, Homo sapiens
  Table A; Target 99716; HLA-A*32:01; UGT2B11; ENSG00000213759; TAA
KTVINDPLY

SEQ ID NO: 99717 - protein, 9 aa, Homo sapiens
  Table A; Target 99717; HLA-B*15:01; UGT2B11; ENSG00000213759; TAA
KTVINDPLY

SEQ ID NO: 99718 - protein, 9 aa, Homo sapiens
  Table A; Target 99718; HLA-B*15:03; UGT2B11; ENSG00000213759; TAA
KTVINDPLY

SEQ ID NO: 99719 - protein, 9 aa, Homo sapiens
  Table A; Target 99719; HLA-B*27:02; UGT2B11; ENSG00000213759; TAA
KTVINDPLY

SEQ ID NO: 99720 - protein, 9 aa, Homo sapiens
  Table A; Target 99720; HLA-B*27:05; UGT2B11; ENSG00000213759; TAA
KTVINDPLY

SEQ ID NO: 99721 - protein, 9 aa, Homo sapiens
  Table A; Target 99721; HLA-B*57:01; UGT2B11; ENSG00000213759; TAA
KTVINDPLY

SEQ ID NO: 99722 - protein, 9 aa, Homo sapiens
  Table A; Target 99722; HLA-B*58:01; UGT2B11; ENSG00000213759; TAA
KTVINDPLY

SEQ ID NO: 99723 - protein, 9 aa, Homo sapiens
  Table A; Target 99723; HLA-C*06:02; UGT2B11; ENSG00000213759; TAA
KTVINDPLY

SEQ ID NO: 99724 - protein, 9 aa, Homo sapiens
  Table A; Target 99724; HLA-C*07:01; UGT2B11; ENSG00000213759; TAA
KTVINDPLY

SEQ ID NO: 99725 - protein, 9 aa, Homo sapiens
  Table A; Target 99725; HLA-C*16:01; UGT2B11; ENSG00000213759; TAA
KTVINDPLY

SEQ ID NO: 99726 - protein, 9 aa, Homo sapiens
  Table A; Target 99726; HLA-C*16:02; UGT2B11; ENSG00000213759; TAA
KTVINDPLY

SEQ ID NO: 99727 - protein, 10 aa, Homo sapiens
  Table A; Target 99727; HLA-A*01:01; UGT2B11; ENSG00000213759; TAA
KTVINDPLYK

SEQ ID NO: 99728 - protein, 10 aa, Homo sapiens
  Table A; Target 99728; HLA-A*03:01; UGT2B11; ENSG00000213759; TAA
KTVINDPLYK

SEQ ID NO: 99729 - protein, 10 aa, Homo sapiens
  Table A; Target 99729; HLA-A*03:02; UGT2B11; ENSG00000213759; TAA
KTVINDPLYK

SEQ ID NO: 99730 - protein, 10 aa, Homo sapiens
  Table A; Target 99730; HLA-A*11:01; UGT2B11; ENSG00000213759; TAA
KTVINDPLYK

SEQ ID NO: 99731 - protein, 10 aa, Homo sapiens
  Table A; Target 99731; HLA-A*31:01; UGT2B11; ENSG00000213759; TAA
KTVINDPLYK

SEQ ID NO: 99732 - protein, 10 aa, Homo sapiens
  Table A; Target 99732; HLA-A*68:01; UGT2B11; ENSG00000213759; TAA
KTVINDPLYK

SEQ ID NO: 99733 - protein, 10 aa, Homo sapiens
  Table A; Target 99733; HLA-B*27:02; UGT2B11; ENSG00000213759; TAA
KTVINDPLYK

SEQ ID NO: 99734 - protein, 10 aa, Homo sapiens
  Table A; Target 99734; HLA-B*27:05; UGT2B11; ENSG00000213759; TAA
KTVINDPLYK

SEQ ID NO: 99735 - protein, 10 aa, Homo sapiens
  Table A; Target 99735; HLA-B*57:01; UGT2B11; ENSG00000213759; TAA
KTVINDPLYK

SEQ ID NO: 99736 - protein, 10 aa, Homo sapiens
  Table A; Target 99736; HLA-B*58:01; UGT2B11; ENSG00000213759; TAA
KTVINDPLYK

SEQ ID NO: 99737 - protein, 10 aa, Homo sapiens
  Table A; Target 99737; HLA-C*06:02; UGT2B11; ENSG00000213759; TAA
KTVINDPLYK

SEQ ID NO: 99738 - protein, 10 aa, Homo sapiens
  Table A; Target 99738; HLA-C*07:01; UGT2B11; ENSG00000213759; TAA
KTVINDPLYK

SEQ ID NO: 99739 - protein, 10 aa, Homo sapiens
  Table A; Target 99739; HLA-C*07:02; UGT2B11; ENSG00000213759; TAA
KTVINDPLYK

SEQ ID NO: 99740 - protein, 9 aa, Homo sapiens
  Table A; Target 99740; HLA-A*03:01; UGT2B11; ENSG00000213759; TAA
KVLVWAAEY

SEQ ID NO: 99741 - protein, 9 aa, Homo sapiens
  Table A; Target 99741; HLA-A*29:02; UGT2B11; ENSG00000213759; TAA
KVLVWAAEY

SEQ ID NO: 99742 - protein, 9 aa, Homo sapiens
  Table A; Target 99742; HLA-A*30:02; UGT2B11; ENSG00000213759; TAA
KVLVWAAEY

SEQ ID NO: 99743 - protein, 9 aa, Homo sapiens
  Table A; Target 99743; HLA-A*31:01; UGT2B11; ENSG00000213759; TAA
KVLVWAAEY

SEQ ID NO: 99744 - protein, 9 aa, Homo sapiens
  Table A; Target 99744; HLA-A*32:01; UGT2B11; ENSG00000213759; TAA
KVLVWAAEY

SEQ ID NO: 99745 - protein, 9 aa, Homo sapiens
  Table A; Target 99745; HLA-B*15:01; UGT2B11; ENSG00000213759; TAA
KVLVWAAEY

SEQ ID NO: 99746 - protein, 9 aa, Homo sapiens
  Table A; Target 99746; HLA-B*46:01; UGT2B11; ENSG00000213759; TAA
KVLVWAAEY

SEQ ID NO: 99747 - protein, 9 aa, Homo sapiens
  Table A; Target 99747; HLA-B*57:01; UGT2B11; ENSG00000213759; TAA
KVLVWAAEY

SEQ ID NO: 99748 - protein, 9 aa, Homo sapiens
  Table A; Target 99748; HLA-B*58:01; UGT2B11; ENSG00000213759; TAA
KVLVWAAEY

SEQ ID NO: 99749 - protein, 9 aa, Homo sapiens
  Table A; Target 99749; HLA-A*23:01; UGT2B11; ENSG00000213759; TAA
KWIPQNDLL

SEQ ID NO: 99750 - protein, 9 aa, Homo sapiens
  Table A; Target 99750; HLA-A*24:02; UGT2B11; ENSG00000213759; TAA
KWIPQNDLL

SEQ ID NO: 99751 - protein, 9 aa, Homo sapiens
  Table A; Target 99751; HLA-A*23:01; UGT2B11; ENSG00000213759; TAA
KWTSVLLLI

SEQ ID NO: 99752 - protein, 9 aa, Homo sapiens
  Table A; Target 99752; HLA-A*24:02; UGT2B11; ENSG00000213759; TAA
KWTSVLLLI

SEQ ID NO: 99753 - protein, 9 aa, Homo sapiens
  Table A; Target 99753; HLA-B*57:01; UGT2B11; ENSG00000213759; TAA
LAALLNIRF

SEQ ID NO: 99754 - protein, 9 aa, Homo sapiens
  Table A; Target 99754; HLA-C*02:02; UGT2B11; ENSG00000213759; TAA
LAALLNIRF

SEQ ID NO: 99755 - protein, 8 aa, Homo sapiens
  Table A; Target 99755; HLA-B*51:01; UGT2B11; ENSG00000213759; TAA
LACVATVI

SEQ ID NO: 99756 - protein, 9 aa, Homo sapiens
  Table A; Target 99756; HLA-C*12:03; UGT2B11; ENSG00000213759; TAA
LACVATVIF

SEQ ID NO: 99757 - protein, 8 aa, Homo sapiens
  Table A; Target 99757; HLA-B*08:01; UGT2B11; ENSG00000213759; TAA
LAKIPQKV

SEQ ID NO: 99758 - protein, 8 aa, Homo sapiens
  Table A; Target 99758; HLA-B*51:01; UGT2B11; ENSG00000213759; TAA
LAKIPQKV

SEQ ID NO: 99759 - protein, 9 aa, Homo sapiens
  Table A; Target 99759; HLA-B*08:01; UGT2B11; ENSG00000213759; TAA
LAKIPQKVL

SEQ ID NO: 99760 - protein, 10 aa, Homo sapiens
  Table A; Target 99760; HLA-B*57:01; UGT2B11; ENSG00000213759; TAA
LAKIPQKVLW

SEQ ID NO: 99761 - protein, 8 aa, Homo sapiens
  Table A; Target 99761; HLA-C*03:03; UGT2B11; ENSG00000213759; TAA
LASSASIL

SEQ ID NO: 99762 - protein, 8 aa, Homo sapiens
  Table A; Target 99762; HLA-C*03:04; UGT2B11; ENSG00000213759; TAA
LASSASIL

SEQ ID NO: 99763 - protein, 8 aa, Homo sapiens
  Table A; Target 99763; HLA-C*05:01; UGT2B11; ENSG00000213759; TAA
LASSASIL

SEQ ID NO: 99764 - protein, 8 aa, Homo sapiens
  Table A; Target 99764; HLA-C*12:03; UGT2B11; ENSG00000213759; TAA
LASSASIL

SEQ ID NO: 99765 - protein, 9 aa, Homo sapiens
  Table A; Target 99765; HLA-A*23:01; UGT2B11; ENSG00000213759; TAA
LASSASILF

SEQ ID NO: 99766 - protein, 9 aa, Homo sapiens
  Table A; Target 99766; HLA-B*35:01; UGT2B11; ENSG00000213759; TAA
LASSASILF

SEQ ID NO: 99767 - protein, 9 aa, Homo sapiens
  Table A; Target 99767; HLA-B*35:03; UGT2B11; ENSG00000213759; TAA
LASSASILF

SEQ ID NO: 99768 - protein, 9 aa, Homo sapiens
  Table A; Target 99768; HLA-B*38:01; UGT2B11; ENSG00000213759; TAA
LASSASILF

SEQ ID NO: 99769 - protein, 9 aa, Homo sapiens
  Table A; Target 99769; HLA-B*46:01; UGT2B11; ENSG00000213759; TAA
LASSASILF

SEQ ID NO: 99770 - protein, 9 aa, Homo sapiens
  Table A; Target 99770; HLA-B*57:01; UGT2B11; ENSG00000213759; TAA
LASSASILF

SEQ ID NO: 99771 - protein, 9 aa, Homo sapiens
  Table A; Target 99771; HLA-B*58:01; UGT2B11; ENSG00000213759; TAA
LASSASILF

SEQ ID NO: 99772 - protein, 9 aa, Homo sapiens
  Table A; Target 99772; HLA-C*02:02; UGT2B11; ENSG00000213759; TAA
LASSASILF

SEQ ID NO: 99773 - protein, 9 aa, Homo sapiens
  Table A; Target 99773; HLA-C*03:03; UGT2B11; ENSG00000213759; TAA
LASSASILF

SEQ ID NO: 99774 - protein, 9 aa, Homo sapiens
  Table A; Target 99774; HLA-C*03:04; UGT2B11; ENSG00000213759; TAA
LASSASILF

SEQ ID NO: 99775 - protein, 9 aa, Homo sapiens
  Table A; Target 99775; HLA-C*05:01; UGT2B11; ENSG00000213759; TAA
LASSASILF

SEQ ID NO: 99776 - protein, 9 aa, Homo sapiens
  Table A; Target 99776; HLA-C*07:04; UGT2B11; ENSG00000213759; TAA
LASSASILF

SEQ ID NO: 99777 - protein, 9 aa, Homo sapiens
  Table A; Target 99777; HLA-C*07:06; UGT2B11; ENSG00000213759; TAA
LASSASILF

SEQ ID NO: 99778 - protein, 9 aa, Homo sapiens
  Table A; Target 99778; HLA-C*12:03; UGT2B11; ENSG00000213759; TAA
LASSASILF

SEQ ID NO: 99779 - protein, 9 aa, Homo sapiens
  Table A; Target 99779; HLA-C*16:01; UGT2B11; ENSG00000213759; TAA
LASSASILF

SEQ ID NO: 99780 - protein, 9 aa, Homo sapiens
  Table A; Target 99780; HLA-C*16:04; UGT2B11; ENSG00000213759; TAA
LASSASILF

SEQ ID NO: 99781 - protein, 8 aa, Homo sapiens
  Table A; Target 99781; HLA-B*37:01; UGT2B11; ENSG00000213759; TAA
LDVIGFLL

SEQ ID NO: 99782 - protein, 8 aa, Homo sapiens
  Table A; Target 99782; HLA-B*40:02; UGT2B11; ENSG00000213759; TAA
LDVIGFLL

SEQ ID NO: 99783 - protein, 10 aa, Homo sapiens
  Table A; Target 99783; HLA-A*23:01; UGT2B11; ENSG00000213759; TAA
LFDPNDASTL

SEQ ID NO: 99784 - protein, 10 aa, Homo sapiens
  Table A; Target 99784; HLA-B*27:05; UGT2B11; ENSG00000213759; TAA
LFDPNDASTL

SEQ ID NO: 99785 - protein, 10 aa, Homo sapiens
  Table A; Target 99785; HLA-B*35:01; UGT2B11; ENSG00000213759; TAA
LFDPNDASTL

SEQ ID NO: 99786 - protein, 10 aa, Homo sapiens
  Table A; Target 99786; HLA-B*35:03; UGT2B11; ENSG00000213759; TAA
LFDPNDASTL

SEQ ID NO: 99787 - protein, 10 aa, Homo sapiens
  Table A; Target 99787; HLA-B*38:01; UGT2B11; ENSG00000213759; TAA
LFDPNDASTL

SEQ ID NO: 99788 - protein, 10 aa, Homo sapiens
  Table A; Target 99788; HLA-B*39:01; UGT2B11; ENSG00000213759; TAA
LFDPNDASTL

SEQ ID NO: 99789 - protein, 10 aa, Homo sapiens
  Table A; Target 99789; HLA-B*40:01; UGT2B11; ENSG00000213759; TAA
LFDPNDASTL

SEQ ID NO: 99790 - protein, 10 aa, Homo sapiens
  Table A; Target 99790; HLA-B*55:01; UGT2B11; ENSG00000213759; TAA
LFDPNDASTL

SEQ ID NO: 99791 - protein, 10 aa, Homo sapiens
  Table A; Target 99791; HLA-C*03:03; UGT2B11; ENSG00000213759; TAA
LFDPNDASTL

SEQ ID NO: 99792 - protein, 10 aa, Homo sapiens
  Table A; Target 99792; HLA-C*03:04; UGT2B11; ENSG00000213759; TAA
LFDPNDASTL

SEQ ID NO: 99793 - protein, 10 aa, Homo sapiens
  Table A; Target 99793; HLA-C*04:01; UGT2B11; ENSG00000213759; TAA
LFDPNDASTL

SEQ ID NO: 99794 - protein, 10 aa, Homo sapiens
  Table A; Target 99794; HLA-C*05:01; UGT2B11; ENSG00000213759; TAA
LFDPNDASTL

SEQ ID NO: 99795 - protein, 10 aa, Homo sapiens
  Table A; Target 99795; HLA-C*07:04; UGT2B11; ENSG00000213759; TAA
LFDPNDASTL

SEQ ID NO: 99796 - protein, 10 aa, Homo sapiens
  Table A; Target 99796; HLA-C*14:02; UGT2B11; ENSG00000213759; TAA
LFDPNDASTL

SEQ ID NO: 99797 - protein, 11 aa, Homo sapiens
  Table A; Target 99797; HLA-B*27:05; UGT2B11; ENSG00000213759; TAA
LFDPNDASTLK

SEQ ID NO: 99798 - protein, 9 aa, Homo sapiens
  Table A; Target 99798; HLA-A*23:01; UGT2B11; ENSG00000213759; TAA
LFFDQPDNI

SEQ ID NO: 99799 - protein, 9 aa, Homo sapiens
  Table A; Target 99799; HLA-B*46:01; UGT2B11; ENSG00000213759; TAA
LGHPKTRAF

SEQ ID NO: 99800 - protein, 8 aa, Homo sapiens
  Table A; Target 99800; HLA-C*07:01; UGT2B11; ENSG00000213759; TAA
LGLNTRLY

SEQ ID NO: 99801 - protein, 8 aa, Homo sapiens
  Table A; Target 99801; HLA-B*46:01; UGT2B11; ENSG00000213759; TAA
LGRPTTLF

SEQ ID NO: 99802 - protein, 8 aa, Homo sapiens
  Table A; Target 99802; HLA-B*27:05; UGT2B11; ENSG00000213759; TAA
LGSVISNM

SEQ ID NO: 99803 - protein, 8 aa, Homo sapiens
  Table A; Target 99803; HLA-C*01:02; UGT2B11; ENSG00000213759; TAA
LGSVISNM

SEQ ID NO: 99804 - protein, 8 aa, Homo sapiens
  Table A; Target 99804; HLA-C*04:01; UGT2B11; ENSG00000213759; TAA
LGSVISNM

SEQ ID NO: 99805 - protein, 8 aa, Homo sapiens
  Table A; Target 99805; HLA-C*07:04; UGT2B11; ENSG00000213759; TAA
LGSVISNM

SEQ ID NO: 99806 - protein, 8 aa, Homo sapiens
  Table A; Target 99806; HLA-C*12:03; UGT2B11; ENSG00000213759; TAA
LGSVISNM

SEQ ID NO: 99807 - protein, 9 aa, Homo sapiens
  Table A; Target 99807; HLA-B*27:05; UGT2B11; ENSG00000213759; TAA
LGSVISNMT

SEQ ID NO: 99808 - protein, 9 aa, Homo sapiens
  Table A; Target 99808; HLA-C*06:02; UGT2B11; ENSG00000213759; TAA
LGSVISNMT

SEQ ID NO: 99809 - protein, 8 aa, Homo sapiens
  Table A; Target 99809; HLA-A*02:03; UGT2B11; ENSG00000213759; TAA
LIFPPSYI

SEQ ID NO: 99810 - protein, 10 aa, Homo sapiens
  Table A; Target 99810; HLA-A*02:07; UGT2B11; ENSG00000213759; TAA
LIFPPSYIPI

SEQ ID NO: 99811 - protein, 10 aa, Homo sapiens
  Table A; Target 99811; HLA-A*68:02; UGT2B11; ENSG00000213759; TAA
LIFPPSYIPI

SEQ ID NO: 99812 - protein, 11 aa, Homo sapiens
  Table A; Target 99812; HLA-A*02:01; UGT2B11; ENSG00000213759; TAA
LIFPPSYIPIV

SEQ ID NO: 99813 - protein, 11 aa, Homo sapiens
  Table A; Target 99813; HLA-A*02:04; UGT2B11; ENSG00000213759; TAA
LIFPPSYIPIV

SEQ ID NO: 99814 - protein, 11 aa, Homo sapiens
  Table A; Target 99814; HLA-A*02:07; UGT2B11; ENSG00000213759; TAA
LIFPPSYIPIV

SEQ ID NO: 99815 - protein, 9 aa, Homo sapiens
  Table A; Target 99815; HLA-B*13:02; UGT2B11; ENSG00000213759; TAA
LLACVATVI

SEQ ID NO: 99816 - protein, 8 aa, Homo sapiens
  Table A; Target 99816; HLA-B*46:01; UGT2B11; ENSG00000213759; TAA
LLIHLSCY

SEQ ID NO: 99817 - protein, 9 aa, Homo sapiens
  Table A; Target 99817; HLA-A*29:02; UGT2B11; ENSG00000213759; TAA
LLLIHLSCY

SEQ ID NO: 99818 - protein, 8 aa, Homo sapiens
  Table A; Target 99818; HLA-A*02:03; UGT2B11; ENSG00000213759; TAA
LLNALKTV

SEQ ID NO: 99819 - protein, 9 aa, Homo sapiens
  Table A; Target 99819; HLA-A*02:03; UGT2B11; ENSG00000213759; TAA
LLNALKTVI

SEQ ID NO: 99820 - protein, 9 aa, Homo sapiens
  Table A; Target 99820; HLA-A*02:04; UGT2B11; ENSG00000213759; TAA
LLNALKTVI

SEQ ID NO: 99821 - protein, 9 aa, Homo sapiens
  Table A; Target 99821; HLA-A*32:01; UGT2B11; ENSG00000213759; TAA
LLNALKTVI

SEQ ID NO: 99822 - protein, 9 aa, Homo sapiens
  Table A; Target 99822; HLA-B*08:01; UGT2B11; ENSG00000213759; TAA
LLNALKTVI

SEQ ID NO: 99823 - protein, 9 aa, Homo sapiens
  Table A; Target 99823; HLA-B*13:02; UGT2B11; ENSG00000213759; TAA
LLNALKTVI

SEQ ID NO: 99824 - protein, 9 aa, Homo sapiens
  Table A; Target 99824; HLA-C*07:04; UGT2B11; ENSG00000213759; TAA
LLNALKTVI

SEQ ID NO: 99825 - protein, 8 aa, Homo sapiens
  Table A; Target 99825; HLA-A*29:02; UGT2B11; ENSG00000213759; TAA
LLNIRFVY

SEQ ID NO: 99826 - protein, 10 aa, Homo sapiens
  Table A; Target 99826; HLA-A*02:04; UGT2B11; ENSG00000213759; TAA
LLNIRFVYSL

SEQ ID NO: 99827 - protein, 8 aa, Homo sapiens
  Table A; Target 99827; HLA-B*08:01; UGT2B11; ENSG00000213759; TAA
LNALKTVI

SEQ ID NO: 99828 - protein, 8 aa, Homo sapiens
  Table A; Target 99828; HLA-B*08:01; UGT2B11; ENSG00000213759; TAA
LPKEMEEF

SEQ ID NO: 99829 - protein, 8 aa, Homo sapiens
  Table A; Target 99829; HLA-B*46:01; UGT2B11; ENSG00000213759; TAA
LPKEMEEF

SEQ ID NO: 99830 - protein, 9 aa, Homo sapiens
  Table A; Target 99830; HLA-B*51:01; UGT2B11; ENSG00000213759; TAA
LPKEMEEFV

SEQ ID NO: 99831 - protein, 9 aa, Homo sapiens
  Table A; Target 99831; HLA-B*54:01; UGT2B11; ENSG00000213759; TAA
LPKEMEEFV

SEQ ID NO: 99832 - protein, 9 aa, Homo sapiens
  Table A; Target 99832; HLA-C*16:04; UGT2B11; ENSG00000213759; TAA
LRFTPGYTI

SEQ ID NO: 99833 - protein, 8 aa, Homo sapiens
  Table A; Target 99833; HLA-A*01:01; UGT2B11; ENSG00000213759; TAA
LSDQMTFM

SEQ ID NO: 99834 - protein, 8 aa, Homo sapiens
  Table A; Target 99834; HLA-C*04:01; UGT2B11; ENSG00000213759; TAA
LSDQMTFM

SEQ ID NO: 99835 - protein, 8 aa, Homo sapiens
  Table A; Target 99835; HLA-C*05:01; UGT2B11; ENSG00000213759; TAA
LSDQMTFM

SEQ ID NO: 99836 - protein, 10 aa, Homo sapiens
  Table A; Target 99836; HLA-A*01:01; UGT2B11; ENSG00000213759; TAA
LSDQMTFMER

SEQ ID NO: 99837 - protein, 9 aa, Homo sapiens
  Table A; Target 99837; HLA-A*24:02; UGT2B11; ENSG00000213759; TAA
LTKTEFENI

SEQ ID NO: 99838 - protein, 9 aa, Homo sapiens
  Table A; Target 99838; HLA-A*25:01; UGT2B11; ENSG00000213759; TAA
LTKTEFENI

SEQ ID NO: 99839 - protein, 9 aa, Homo sapiens
  Table A; Target 99839; HLA-B*57:01; UGT2B11; ENSG00000213759; TAA
LTKTEFENI

SEQ ID NO: 99840 - protein, 9 aa, Homo sapiens
  Table A; Target 99840; HLA-A*02:04; UGT2B11; ENSG00000213759; TAA
LTWFQYHSL

SEQ ID NO: 99841 - protein, 10 aa, Homo sapiens
  Table A; Target 99841; HLA-B*57:01; UGT2B11; ENSG00000213759; TAA
LVWAAEYSHW

SEQ ID NO: 99842 - protein, 8 aa, Homo sapiens
  Table A; Target 99842; HLA-A*24:02; UGT2B11; ENSG00000213759; TAA
LYDIFRNF

SEQ ID NO: 99843 - protein, 8 aa, Homo sapiens
  Table A; Target 99843; HLA-A*31:01; UGT2B11; ENSG00000213759; TAA
LYDIFRNF

SEQ ID NO: 99844 - protein, 8 aa, Homo sapiens
  Table A; Target 99844; HLA-C*04:01; UGT2B11; ENSG00000213759; TAA
LYDIFRNF

SEQ ID NO: 99845 - protein, 8 aa, Homo sapiens
  Table A; Target 99845; HLA-C*07:01; UGT2B11; ENSG00000213759; TAA
LYDIFRNF

SEQ ID NO: 99846 - protein, 9 aa, Homo sapiens
  Table A; Target 99846; HLA-A*24:02; UGT2B11; ENSG00000213759; TAA
LYFDFWFQM

SEQ ID NO: 99847 - protein, 9 aa, Homo sapiens
  Table A; Target 99847; HLA-A*29:02; UGT2B11; ENSG00000213759; TAA
LYFDFWFQM

SEQ ID NO: 99848 - protein, 9 aa, Homo sapiens
  Table A; Target 99848; HLA-A*23:01; UGT2B11; ENSG00000213759; TAA
LYFSQEQEI

SEQ ID NO: 99849 - protein, 9 aa, Homo sapiens
  Table A; Target 99849; HLA-A*24:02; UGT2B11; ENSG00000213759; TAA
LYFSQEQEI

SEQ ID NO: 99850 - protein, 9 aa, Homo sapiens
  Table A; Target 99850; HLA-C*01:02; UGT2B11; ENSG00000213759; TAA
LYFSQEQEI

SEQ ID NO: 99851 - protein, 9 aa, Homo sapiens
  Table A; Target 99851; HLA-C*14:02; UGT2B11; ENSG00000213759; TAA
LYFSQEQEI

SEQ ID NO: 99852 - protein, 11 aa, Homo sapiens
  Table A; Target 99852; HLA-A*24:02; UGT2B11; ENSG00000213759; TAA
LYFSQEQEILW

SEQ ID NO: 99853 - protein, 9 aa, Homo sapiens
  Table A; Target 99853; HLA-A*23:01; UGT2B11; ENSG00000213759; TAA
LYKENIMKL

SEQ ID NO: 99854 - protein, 9 aa, Homo sapiens
  Table A; Target 99854; HLA-A*24:02; UGT2B11; ENSG00000213759; TAA
LYKENIMKL

SEQ ID NO: 99855 - protein, 9 aa, Homo sapiens
  Table A; Target 99855; HLA-B*40:02; UGT2B11; ENSG00000213759; TAA
LYKENIMKL

SEQ ID NO: 99856 - protein, 9 aa, Homo sapiens
  Table A; Target 99856; HLA-C*14:02; UGT2B11; ENSG00000213759; TAA
LYKENIMKL

SEQ ID NO: 99857 - protein, 11 aa, Homo sapiens
  Table A; Target 99857; HLA-A*24:02; UGT2B11; ENSG00000213759; TAA
LYKWIPQNDLL

SEQ ID NO: 99858 - protein, 9 aa, Homo sapiens
  Table A; Target 99858; HLA-B*07:02; UGT2B11; ENSG00000213759; TAA
MPHKGAKHL

SEQ ID NO: 99859 - protein, 9 aa, Homo sapiens
  Table A; Target 99859; HLA-B*08:01; UGT2B11; ENSG00000213759; TAA
MPHKGAKHL

SEQ ID NO: 99860 - protein, 9 aa, Homo sapiens
  Table A; Target 99860; HLA-C*04:01; UGT2B11; ENSG00000213759; TAA
MPHKGAKHL

SEQ ID NO: 99861 - protein, 10 aa, Homo sapiens
  Table A; Target 99861; HLA-B*57:01; UGT2B11; ENSG00000213759; TAA
MSKLSDQMTF

SEQ ID NO: 99862 - protein, 10 aa, Homo sapiens
  Table A; Target 99862; HLA-B*07:02; UGT2B11; ENSG00000213759; TAA
MSSTDLLNAL

SEQ ID NO: 99863 - protein, 10 aa, Homo sapiens
  Table A; Target 99863; HLA-C*07:02; UGT2B11; ENSG00000213759; TAA
MSSTDLLNAL

SEQ ID NO: 99864 - protein, 11 aa, Homo sapiens
  Table A; Target 99864; HLA-A*01:01; UGT2B11; ENSG00000213759; TAA
MSSTDLLNALK

SEQ ID NO: 99865 - protein, 11 aa, Homo sapiens
  Table A; Target 99865; HLA-A*11:01; UGT2B11; ENSG00000213759; TAA
MSSTDLLNALK

SEQ ID NO: 99866 - protein, 11 aa, Homo sapiens
  Table A; Target 99866; HLA-B*27:02; UGT2B11; ENSG00000213759; TAA
MSSTDLLNALK

SEQ ID NO: 99867 - protein, 11 aa, Homo sapiens
  Table A; Target 99867; HLA-C*07:06; UGT2B11; ENSG00000213759; TAA
MSSTDLLNALK

SEQ ID NO: 99868 - protein, 9 aa, Homo sapiens
  Table A; Target 99868; HLA-A*02:03; UGT2B11; ENSG00000213759; TAA
MTAERANVI

SEQ ID NO: 99869 - protein, 9 aa, Homo sapiens
  Table A; Target 99869; HLA-A*24:02; UGT2B11; ENSG00000213759; TAA
MTAERANVI

SEQ ID NO: 99870 - protein, 9 aa, Homo sapiens
  Table A; Target 99870; HLA-A*25:01; UGT2B11; ENSG00000213759; TAA
MTAERANVI

SEQ ID NO: 99871 - protein, 9 aa, Homo sapiens
  Table A; Target 99871; HLA-A*26:01; UGT2B11; ENSG00000213759; TAA
MTAERANVI

SEQ ID NO: 99872 - protein, 9 aa, Homo sapiens
  Table A; Target 99872; HLA-A*32:01; UGT2B11; ENSG00000213759; TAA
MTAERANVI

SEQ ID NO: 99873 - protein, 9 aa, Homo sapiens
  Table A; Target 99873; HLA-A*33:03; UGT2B11; ENSG00000213759; TAA
MTAERANVI

SEQ ID NO: 99874 - protein, 9 aa, Homo sapiens
  Table A; Target 99874; HLA-A*68:02; UGT2B11; ENSG00000213759; TAA
MTAERANVI

SEQ ID NO: 99875 - protein, 9 aa, Homo sapiens
  Table A; Target 99875; HLA-B*07:02; UGT2B11; ENSG00000213759; TAA
MTAERANVI

SEQ ID NO: 99876 - protein, 9 aa, Homo sapiens
  Table A; Target 99876; HLA-B*08:01; UGT2B11; ENSG00000213759; TAA
MTAERANVI

SEQ ID NO: 99877 - protein, 9 aa, Homo sapiens
  Table A; Target 99877; HLA-B*13:02; UGT2B11; ENSG00000213759; TAA
MTAERANVI

SEQ ID NO: 99878 - protein, 9 aa, Homo sapiens
  Table A; Target 99878; HLA-B*35:03; UGT2B11; ENSG00000213759; TAA
MTAERANVI

SEQ ID NO: 99879 - protein, 9 aa, Homo sapiens
  Table A; Target 99879; HLA-B*38:01; UGT2B11; ENSG00000213759; TAA
MTAERANVI

SEQ ID NO: 99880 - protein, 9 aa, Homo sapiens
  Table A; Target 99880; HLA-B*40:02; UGT2B11; ENSG00000213759; TAA
MTAERANVI

SEQ ID NO: 99881 - protein, 9 aa, Homo sapiens
  Table A; Target 99881; HLA-B*51:01; UGT2B11; ENSG00000213759; TAA
MTAERANVI

SEQ ID NO: 99882 - protein, 9 aa, Homo sapiens
  Table A; Target 99882; HLA-B*54:01; UGT2B11; ENSG00000213759; TAA
MTAERANVI

SEQ ID NO: 99883 - protein, 9 aa, Homo sapiens
  Table A; Target 99883; HLA-B*58:01; UGT2B11; ENSG00000213759; TAA
MTAERANVI

SEQ ID NO: 99884 - protein, 9 aa, Homo sapiens
  Table A; Target 99884; HLA-C*01:02; UGT2B11; ENSG00000213759; TAA
MTAERANVI

SEQ ID NO: 99885 - protein, 9 aa, Homo sapiens
  Table A; Target 99885; HLA-C*02:02; UGT2B11; ENSG00000213759; TAA
MTAERANVI

SEQ ID NO: 99886 - protein, 9 aa, Homo sapiens
  Table A; Target 99886; HLA-C*03:03; UGT2B11; ENSG00000213759; TAA
MTAERANVI

SEQ ID NO: 99887 - protein, 9 aa, Homo sapiens
  Table A; Target 99887; HLA-C*03:04; UGT2B11; ENSG00000213759; TAA
MTAERANVI

SEQ ID NO: 99888 - protein, 9 aa, Homo sapiens
  Table A; Target 99888; HLA-C*06:02; UGT2B11; ENSG00000213759; TAA
MTAERANVI

SEQ ID NO: 99889 - protein, 9 aa, Homo sapiens
  Table A; Target 99889; HLA-C*07:04; UGT2B11; ENSG00000213759; TAA
MTAERANVI

SEQ ID NO: 99890 - protein, 9 aa, Homo sapiens
  Table A; Target 99890; HLA-C*12:03; UGT2B11; ENSG00000213759; TAA
MTAERANVI

SEQ ID NO: 99891 - protein, 9 aa, Homo sapiens
  Table A; Target 99891; HLA-C*16:01; UGT2B11; ENSG00000213759; TAA
MTAERANVI

SEQ ID NO: 99892 - protein, 9 aa, Homo sapiens
  Table A; Target 99892; HLA-C*16:02; UGT2B11; ENSG00000213759; TAA
MTAERANVI

SEQ ID NO: 99893 - protein, 8 aa, Homo sapiens
  Table A; Target 99893; HLA-B*18:01; UGT2B11; ENSG00000213759; TAA
NDASTLKF

SEQ ID NO: 99894 - protein, 8 aa, Homo sapiens
  Table A; Target 99894; HLA-B*37:01; UGT2B11; ENSG00000213759; TAA
NDASTLKF

SEQ ID NO: 99895 - protein, 8 aa, Homo sapiens
  Table A; Target 99895; HLA-B*37:01; UGT2B11; ENSG00000213759; TAA
NDLLGHPK

SEQ ID NO: 99896 - protein, 8 aa, Homo sapiens
  Table A; Target 99896; HLA-B*18:01; UGT2B11; ENSG00000213759; TAA
NGVVVFSL

SEQ ID NO: 99897 - protein, 8 aa, Homo sapiens
  Table A; Target 99897; HLA-C*07:01; UGT2B11; ENSG00000213759; TAA
NIIMQQVK

SEQ ID NO: 99898 - protein, 9 aa, Homo sapiens
  Table A; Target 99898; HLA-A*68:01; UGT2B11; ENSG00000213759; TAA
NIIMQQVKR

SEQ ID NO: 99899 - protein, 9 aa, Homo sapiens
  Table A; Target 99899; HLA-A*33:01; UGT2B11; ENSG00000213759; TAA
NIRFVYSLR

SEQ ID NO: 99900 - protein, 9 aa, Homo sapiens
  Table A; Target 99900; HLA-A*02:03; UGT2B11; ENSG00000213759; TAA
NMKTILKEL

SEQ ID NO: 99901 - protein, 8 aa, Homo sapiens
  Table A; Target 99901; HLA-C*01:02; UGT2B11; ENSG00000213759; TAA
NTMSSTDL

SEQ ID NO: 99902 - protein, 8 aa, Homo sapiens
  Table A; Target 99902; HLA-C*03:03; UGT2B11; ENSG00000213759; TAA
NTMSSTDL

SEQ ID NO: 99903 - protein, 8 aa, Homo sapiens
  Table A; Target 99903; HLA-C*03:04; UGT2B11; ENSG00000213759; TAA
NTMSSTDL

SEQ ID NO: 99904 - protein, 8 aa, Homo sapiens
  Table A; Target 99904; HLA-C*05:01; UGT2B11; ENSG00000213759; TAA
NTMSSTDL

SEQ ID NO: 99905 - protein, 8 aa, Homo sapiens
  Table A; Target 99905; HLA-C*14:02; UGT2B11; ENSG00000213759; TAA
NTMSSTDL

SEQ ID NO: 99906 - protein, 9 aa, Homo sapiens
  Table A; Target 99906; HLA-A*01:01; UGT2B11; ENSG00000213759; TAA
NTMSSTDLL

SEQ ID NO: 99907 - protein, 9 aa, Homo sapiens
  Table A; Target 99907; HLA-A*26:01; UGT2B11; ENSG00000213759; TAA
NTMSSTDLL

SEQ ID NO: 99908 - protein, 9 aa, Homo sapiens
  Table A; Target 99908; HLA-A*68:02; UGT2B11; ENSG00000213759; TAA
NTMSSTDLL

SEQ ID NO: 99909 - protein, 9 aa, Homo sapiens
  Table A; Target 99909; HLA-B*35:03; UGT2B11; ENSG00000213759; TAA
NTMSSTDLL

SEQ ID NO: 99910 - protein, 9 aa, Homo sapiens
  Table A; Target 99910; HLA-B*38:01; UGT2B11; ENSG00000213759; TAA
NTMSSTDLL

SEQ ID NO: 99911 - protein, 9 aa, Homo sapiens
  Table A; Target 99911; HLA-B*39:01; UGT2B11; ENSG00000213759; TAA
NTMSSTDLL

SEQ ID NO: 99912 - protein, 9 aa, Homo sapiens
  Table A; Target 99912; HLA-C*01:02; UGT2B11; ENSG00000213759; TAA
NTMSSTDLL

SEQ ID NO: 99913 - protein, 9 aa, Homo sapiens
  Table A; Target 99913; HLA-C*05:01; UGT2B11; ENSG00000213759; TAA
NTMSSTDLL

SEQ ID NO: 99914 - protein, 8 aa, Homo sapiens
  Table A; Target 99914; HLA-C*05:01; UGT2B11; ENSG00000213759; TAA
NVDFVGGF

SEQ ID NO: 99915 - protein, 8 aa, Homo sapiens
  Table A; Target 99915; HLA-B*56:01; UGT2B11; ENSG00000213759; TAA
NVIATALA

SEQ ID NO: 99916 - protein, 9 aa, Homo sapiens
  Table A; Target 99916; HLA-A*03:01; UGT2B11; ENSG00000213759; TAA
NVIATALAK

SEQ ID NO: 99917 - protein, 9 aa, Homo sapiens
  Table A; Target 99917; HLA-A*03:02; UGT2B11; ENSG00000213759; TAA
NVIATALAK

SEQ ID NO: 99918 - protein, 9 aa, Homo sapiens
  Table A; Target 99918; HLA-A*11:01; UGT2B11; ENSG00000213759; TAA
NVIATALAK

SEQ ID NO: 99919 - protein, 9 aa, Homo sapiens
  Table A; Target 99919; HLA-A*26:01; UGT2B11; ENSG00000213759; TAA
NVIATALAK

SEQ ID NO: 99920 - protein, 9 aa, Homo sapiens
  Table A; Target 99920; HLA-A*68:01; UGT2B11; ENSG00000213759; TAA
NVIATALAK

SEQ ID NO: 99921 - protein, 9 aa, Homo sapiens
  Table A; Target 99921; HLA-C*07:06; UGT2B11; ENSG00000213759; TAA
NVIATALAK

SEQ ID NO: 99922 - protein, 10 aa, Homo sapiens
  Table A; Target 99922; HLA-A*25:01; UGT2B11; ENSG00000213759; TAA
NVIATALAKI

SEQ ID NO: 99923 - protein, 10 aa, Homo sapiens
  Table A; Target 99923; HLA-A*26:01; UGT2B11; ENSG00000213759; TAA
NVIATALAKI

SEQ ID NO: 99924 - protein, 10 aa, Homo sapiens
  Table A; Target 99924; HLA-A*68:02; UGT2B11; ENSG00000213759; TAA
NVIATALAKI

SEQ ID NO: 99925 - protein, 8 aa, Homo sapiens
  Table A; Target 99925; HLA-A*03:02; UGT2B11; ENSG00000213759; TAA
PDNIAHMK

SEQ ID NO: 99926 - protein, 8 aa, Homo sapiens
  Table A; Target 99926; HLA-B*07:02; UGT2B11; ENSG00000213759; TAA
PDNIAHMK

SEQ ID NO: 99927 - protein, 8 aa, Homo sapiens
  Table A; Target 99927; HLA-B*27:02; UGT2B11; ENSG00000213759; TAA
PDNIAHMK

SEQ ID NO: 99928 - protein, 8 aa, Homo sapiens
  Table A; Target 99928; HLA-C*04:01; UGT2B11; ENSG00000213759; TAA
PDNIAHMK

SEQ ID NO: 99929 - protein, 8 aa, Homo sapiens
  Table A; Target 99929; HLA-C*06:02; UGT2B11; ENSG00000213759; TAA
PDNIAHMK

SEQ ID NO: 99930 - protein, 8 aa, Homo sapiens
  Table A; Target 99930; HLA-C*07:01; UGT2B11; ENSG00000213759; TAA
PDNIAHMK

SEQ ID NO: 99931 - protein, 8 aa, Homo sapiens
  Table A; Target 99931; HLA-C*07:02; UGT2B11; ENSG00000213759; TAA
PDNIAHMK

SEQ ID NO: 99932 - protein, 9 aa, Homo sapiens
  Table A; Target 99932; HLA-A*03:01; UGT2B11; ENSG00000213759; TAA
PLYKENIMK

SEQ ID NO: 99933 - protein, 9 aa, Homo sapiens
  Table A; Target 99933; HLA-A*24:02; UGT2B11; ENSG00000213759; TAA
PMVGIPLFF

SEQ ID NO: 99934 - protein, 9 aa, Homo sapiens
  Table A; Target 99934; HLA-B*35:01; UGT2B11; ENSG00000213759; TAA
PPSYIPIVM

SEQ ID NO: 99935 - protein, 10 aa, Homo sapiens
  Table A; Target 99935; HLA-C*04:01; UGT2B11; ENSG00000213759; TAA
PPSYIPIVMS

SEQ ID NO: 99936 - protein, 10 aa, Homo sapiens
  Table A; Target 99936; HLA-A*03:02; UGT2B11; ENSG00000213759; TAA
PQNDLLGHPK

SEQ ID NO: 99937 - protein, 10 aa, Homo sapiens
  Table A; Target 99937; HLA-A*11:01; UGT2B11; ENSG00000213759; TAA
PQNDLLGHPK

SEQ ID NO: 99938 - protein, 10 aa, Homo sapiens
  Table A; Target 99938; HLA-A*31:01; UGT2B11; ENSG00000213759; TAA
PQNDLLGHPK

SEQ ID NO: 99939 - protein, 10 aa, Homo sapiens
  Table A; Target 99939; HLA-A*33:01; UGT2B11; ENSG00000213759; TAA
PQNDLLGHPK

SEQ ID NO: 99940 - protein, 10 aa, Homo sapiens
  Table A; Target 99940; HLA-B*27:02; UGT2B11; ENSG00000213759; TAA
PQNDLLGHPK

SEQ ID NO: 99941 - protein, 10 aa, Homo sapiens
  Table A; Target 99941; HLA-C*06:02; UGT2B11; ENSG00000213759; TAA
PQNDLLGHPK

SEQ ID NO: 99942 - protein, 8 aa, Homo sapiens
  Table A; Target 99942; HLA-C*12:03; UGT2B11; ENSG00000213759; TAA
PSYIPIVM

SEQ ID NO: 99943 - protein, 10 aa, Homo sapiens
  Table A; Target 99943; HLA-B*27:02; UGT2B11; ENSG00000213759; TAA
PTTLFETMGK

SEQ ID NO: 99944 - protein, 9 aa, Homo sapiens
  Table A; Target 99944; HLA-C*07:02; UGT2B11; ENSG00000213759; TAA
PVKPLDRAV

SEQ ID NO: 99945 - protein, 8 aa, Homo sapiens
  Table A; Target 99945; HLA-B*18:01; UGT2B11; ENSG00000213759; TAA
QEILWELY

SEQ ID NO: 99946 - protein, 9 aa, Homo sapiens
  Table A; Target 99946; HLA-A*02:04; UGT2B11; ENSG00000213759; TAA
QEQEILWEL

SEQ ID NO: 99947 - protein, 9 aa, Homo sapiens
  Table A; Target 99947; HLA-A*30:01; UGT2B11; ENSG00000213759; TAA
QEQEILWEL

SEQ ID NO: 99948 - protein, 9 aa, Homo sapiens
  Table A; Target 99948; HLA-B*18:01; UGT2B11; ENSG00000213759; TAA
QEQEILWEL

SEQ ID NO: 99949 - protein, 9 aa, Homo sapiens
  Table A; Target 99949; HLA-B*38:01; UGT2B11; ENSG00000213759; TAA
QEQEILWEL

SEQ ID NO: 99950 - protein, 9 aa, Homo sapiens
  Table A; Target 99950; HLA-B*40:01; UGT2B11; ENSG00000213759; TAA
QEQEILWEL

SEQ ID NO: 99951 - protein, 9 aa, Homo sapiens
  Table A; Target 99951; HLA-B*40:02; UGT2B11; ENSG00000213759; TAA
QEQEILWEL

SEQ ID NO: 99952 - protein, 9 aa, Homo sapiens
  Table A; Target 99952; HLA-B*44:02; UGT2B11; ENSG00000213759; TAA
QEQEILWEL

SEQ ID NO: 99953 - protein, 9 aa, Homo sapiens
  Table A; Target 99953; HLA-B*44:03; UGT2B11; ENSG00000213759; TAA
QEQEILWEL

SEQ ID NO: 99954 - protein, 9 aa, Homo sapiens
  Table A; Target 99954; HLA-B*49:01; UGT2B11; ENSG00000213759; TAA
QEQEILWEL

SEQ ID NO: 99955 - protein, 10 aa, Homo sapiens
  Table A; Target 99955; HLA-B*44:02; UGT2B11; ENSG00000213759; TAA
QEQEILWELY

SEQ ID NO: 99956 - protein, 10 aa, Homo sapiens
  Table A; Target 99956; HLA-B*44:03; UGT2B11; ENSG00000213759; TAA
QEQEILWELY

SEQ ID NO: 99957 - protein, 8 aa, Homo sapiens
  Table A; Target 99957; HLA-B*49:01; UGT2B11; ENSG00000213759; TAA
QESRFDIV

SEQ ID NO: 99958 - protein, 9 aa, Homo sapiens
  Table A; Target 99958; HLA-A*30:01; UGT2B11; ENSG00000213759; TAA
QESRFDIVF

SEQ ID NO: 99959 - protein, 9 aa, Homo sapiens
  Table A; Target 99959; HLA-B*18:01; UGT2B11; ENSG00000213759; TAA
QESRFDIVF

SEQ ID NO: 99960 - protein, 9 aa, Homo sapiens
  Table A; Target 99960; HLA-B*37:01; UGT2B11; ENSG00000213759; TAA
QESRFDIVF

SEQ ID NO: 99961 - protein, 9 aa, Homo sapiens
  Table A; Target 99961; HLA-B*38:01; UGT2B11; ENSG00000213759; TAA
QESRFDIVF

SEQ ID NO: 99962 - protein, 9 aa, Homo sapiens
  Table A; Target 99962; HLA-B*40:01; UGT2B11; ENSG00000213759; TAA
QESRFDIVF

SEQ ID NO: 99963 - protein, 9 aa, Homo sapiens
  Table A; Target 99963; HLA-B*40:02; UGT2B11; ENSG00000213759; TAA
QESRFDIVF

SEQ ID NO: 99964 - protein, 9 aa, Homo sapiens
  Table A; Target 99964; HLA-B*44:02; UGT2B11; ENSG00000213759; TAA
QESRFDIVF

SEQ ID NO: 99965 - protein, 9 aa, Homo sapiens
  Table A; Target 99965; HLA-B*44:03; UGT2B11; ENSG00000213759; TAA
QESRFDIVF

SEQ ID NO: 99966 - protein, 9 aa, Homo sapiens
  Table A; Target 99966; HLA-B*49:01; UGT2B11; ENSG00000213759; TAA
QESRFDIVF

SEQ ID NO: 99967 - protein, 9 aa, Homo sapiens
  Table A; Target 99967; HLA-B*57:01; UGT2B11; ENSG00000213759; TAA
QESRFDIVF

SEQ ID NO: 99968 - protein, 9 aa, Homo sapiens
  Table A; Target 99968; HLA-C*16:04; UGT2B11; ENSG00000213759; TAA
QESRFDIVF

SEQ ID NO: 99969 - protein, 9 aa, Homo sapiens
  Table A; Target 99969; HLA-A*31:01; UGT2B11; ENSG00000213759; TAA
QFYSEVLGR

SEQ ID NO: 99970 - protein, 9 aa, Homo sapiens
  Table A; Target 99970; HLA-A*33:01; UGT2B11; ENSG00000213759; TAA
QFYSEVLGR

SEQ ID NO: 99971 - protein, 9 aa, Homo sapiens
  Table A; Target 99971; HLA-A*33:03; UGT2B11; ENSG00000213759; TAA
QFYSEVLGR

SEQ ID NO: 99972 - protein, 9 aa, Homo sapiens
  Table A; Target 99972; HLA-B*38:01; UGT2B11; ENSG00000213759; TAA
QHDQPVKPL

SEQ ID NO: 99973 - protein, 9 aa, Homo sapiens
  Table A; Target 99973; HLA-B*39:01; UGT2B11; ENSG00000213759; TAA
QHDQPVKPL

SEQ ID NO: 99974 - protein, 9 aa, Homo sapiens
  Table A; Target 99974; HLA-A*33:03; UGT2B11; ENSG00000213759; TAA
QNDLLGHPK

SEQ ID NO: 99975 - protein, 8 aa, Homo sapiens
  Table A; Target 99975; HLA-B*35:01; UGT2B11; ENSG00000213759; TAA
QPDNIAHM

SEQ ID NO: 99976 - protein, 8 aa, Homo sapiens
  Table A; Target 99976; HLA-B*35:03; UGT2B11; ENSG00000213759; TAA
QPDNIAHM

SEQ ID NO: 99977 - protein, 8 aa, Homo sapiens
  Table A; Target 99977; HLA-B*55:01; UGT2B11; ENSG00000213759; TAA
QPDNIAHM

SEQ ID NO: 99978 - protein, 8 aa, Homo sapiens
  Table A; Target 99978; HLA-C*04:01; UGT2B11; ENSG00000213759; TAA
QPDNIAHM

SEQ ID NO: 99979 - protein, 8 aa, Homo sapiens
  Table A; Target 99979; HLA-C*05:01; UGT2B11; ENSG00000213759; TAA
QPDNIAHM

SEQ ID NO: 99980 - protein, 9 aa, Homo sapiens
  Table A; Target 99980; HLA-A*01:01; UGT2B11; ENSG00000213759; TAA
QPDNIAHMK

SEQ ID NO: 99981 - protein, 9 aa, Homo sapiens
  Table A; Target 99981; HLA-A*03:02; UGT2B11; ENSG00000213759; TAA
QPDNIAHMK

SEQ ID NO: 99982 - protein, 9 aa, Homo sapiens
  Table A; Target 99982; HLA-A*33:03; UGT2B11; ENSG00000213759; TAA
QPDNIAHMK

SEQ ID NO: 99983 - protein, 9 aa, Homo sapiens
  Table A; Target 99983; HLA-A*68:01; UGT2B11; ENSG00000213759; TAA
QPDNIAHMK

SEQ ID NO: 99984 - protein, 9 aa, Homo sapiens
  Table A; Target 99984; HLA-B*27:02; UGT2B11; ENSG00000213759; TAA
QPDNIAHMK

SEQ ID NO: 99985 - protein, 9 aa, Homo sapiens
  Table A; Target 99985; HLA-B*35:01; UGT2B11; ENSG00000213759; TAA
QPDNIAHMK

SEQ ID NO: 99986 - protein, 9 aa, Homo sapiens
  Table A; Target 99986; HLA-B*35:03; UGT2B11; ENSG00000213759; TAA
QPDNIAHMK

SEQ ID NO: 99987 - protein, 9 aa, Homo sapiens
  Table A; Target 99987; HLA-B*55:01; UGT2B11; ENSG00000213759; TAA
QPDNIAHMK

SEQ ID NO: 99988 - protein, 10 aa, Homo sapiens
  Table A; Target 99988; HLA-B*54:01; UGT2B11; ENSG00000213759; TAA
QPDNIAHMKA

SEQ ID NO: 99989 - protein, 10 aa, Homo sapiens
  Table A; Target 99989; HLA-B*55:01; UGT2B11; ENSG00000213759; TAA
QPDNIAHMKA

SEQ ID NO: 99990 - protein, 10 aa, Homo sapiens
  Table A; Target 99990; HLA-B*56:01; UGT2B11; ENSG00000213759; TAA
QPDNIAHMKA

SEQ ID NO: 99991 - protein, 9 aa, Homo sapiens
  Table A; Target 99991; HLA-B*54:01; UGT2B11; ENSG00000213759; TAA
QPVKPLDRA

SEQ ID NO: 99992 - protein, 9 aa, Homo sapiens
  Table A; Target 99992; HLA-B*55:01; UGT2B11; ENSG00000213759; TAA
QPVKPLDRA

SEQ ID NO: 99993 - protein, 9 aa, Homo sapiens
  Table A; Target 99993; HLA-B*56:01; UGT2B11; ENSG00000213759; TAA
QPVKPLDRA

SEQ ID NO: 99994 - protein, 10 aa, Homo sapiens
  Table A; Target 99994; HLA-B*07:02; UGT2B11; ENSG00000213759; TAA
QPVKPLDRAV

SEQ ID NO: 99995 - protein, 10 aa, Homo sapiens
  Table A; Target 99995; HLA-B*56:01; UGT2B11; ENSG00000213759; TAA
QPVKPLDRAV

SEQ ID NO: 99996 - protein, 11 aa, Homo sapiens
  Table A; Target 99996; HLA-B*35:01; UGT2B11; ENSG00000213759; TAA
QPVKPLDRAVF

SEQ ID NO: 99997 - protein, 9 aa, Homo sapiens
  Table A; Target 99997; HLA-B*27:05; UGT2B11; ENSG00000213759; TAA
QRGHEVTVL

SEQ ID NO: 99998 - protein, 9 aa, Homo sapiens
  Table A; Target 99998; HLA-B*38:01; UGT2B11; ENSG00000213759; TAA
QRGHEVTVL

SEQ ID NO: 99999 - protein, 9 aa, Homo sapiens
  Table A; Target 99999; HLA-C*07:01; UGT2B11; ENSG00000213759; TAA
QRGHEVTVL

SEQ ID NO: 100000 - protein, 11 aa, Homo sapiens
  Table A; Target 100000; HLA-B*39:01; UGT2B11; ENSG00000213759; TAA
QSSGENGVVVF

SEQ ID NO: 100001 - protein, 11 aa, Homo sapiens
  Table A; Target 100001; HLA-C*07:04; UGT2B11; ENSG00000213759; TAA
QSSGENGVVVF

SEQ ID NO: 100002 - protein, 11 aa, Homo sapiens
  Table A; Target 100002; HLA-C*07:06; UGT2B11; ENSG00000213759; TAA
QSSGENGVVVF

SEQ ID NO: 100003 - protein, 9 aa, Homo sapiens
  Table A; Target 100003; HLA-A*31:01; UGT2B11; ENSG00000213759; TAA
QVKRWSDIR

SEQ ID NO: 100004 - protein, 10 aa, Homo sapiens
  Table A; Target 100004; HLA-A*24:02; UGT2B11; ENSG00000213759; TAA
QYHSLDVIGF

SEQ ID NO: 100005 - protein, 9 aa, Homo sapiens
  Table A; Target 100005; HLA-A*02:07; UGT2B11; ENSG00000213759; TAA
RANVIATAL

SEQ ID NO: 100006 - protein, 9 aa, Homo sapiens
  Table A; Target 100006; HLA-A*03:01; UGT2B11; ENSG00000213759; TAA
RANVIATAL

SEQ ID NO: 100007 - protein, 9 aa, Homo sapiens
  Table A; Target 100007; HLA-A*03:02; UGT2B11; ENSG00000213759; TAA
RANVIATAL

SEQ ID NO: 100008 - protein, 9 aa, Homo sapiens
  Table A; Target 100008; HLA-A*23:01; UGT2B11; ENSG00000213759; TAA
RANVIATAL

SEQ ID NO: 100009 - protein, 9 aa, Homo sapiens
  Table A; Target 100009; HLA-A*24:02; UGT2B11; ENSG00000213759; TAA
RANVIATAL

SEQ ID NO: 100010 - protein, 9 aa, Homo sapiens
  Table A; Target 100010; HLA-A*30:01; UGT2B11; ENSG00000213759; TAA
RANVIATAL

SEQ ID NO: 100011 - protein, 9 aa, Homo sapiens
  Table A; Target 100011; HLA-A*31:01; UGT2B11; ENSG00000213759; TAA
RANVIATAL

SEQ ID NO: 100012 - protein, 9 aa, Homo sapiens
  Table A; Target 100012; HLA-A*32:01; UGT2B11; ENSG00000213759; TAA
RANVIATAL

SEQ ID NO: 100013 - protein, 9 aa, Homo sapiens
  Table A; Target 100013; HLA-B*07:02; UGT2B11; ENSG00000213759; TAA
RANVIATAL

SEQ ID NO: 100014 - protein, 9 aa, Homo sapiens
  Table A; Target 100014; HLA-B*08:01; UGT2B11; ENSG00000213759; TAA
RANVIATAL

SEQ ID NO: 100015 - protein, 9 aa, Homo sapiens
  Table A; Target 100015; HLA-B*13:02; UGT2B11; ENSG00000213759; TAA
RANVIATAL

SEQ ID NO: 100016 - protein, 9 aa, Homo sapiens
  Table A; Target 100016; HLA-B*15:01; UGT2B11; ENSG00000213759; TAA
RANVIATAL

SEQ ID NO: 100017 - protein, 9 aa, Homo sapiens
  Table A; Target 100017; HLA-B*15:03; UGT2B11; ENSG00000213759; TAA
RANVIATAL

SEQ ID NO: 100018 - protein, 9 aa, Homo sapiens
  Table A; Target 100018; HLA-B*27:02; UGT2B11; ENSG00000213759; TAA
RANVIATAL

SEQ ID NO: 100019 - protein, 9 aa, Homo sapiens
  Table A; Target 100019; HLA-B*27:05; UGT2B11; ENSG00000213759; TAA
RANVIATAL

SEQ ID NO: 100020 - protein, 9 aa, Homo sapiens
  Table A; Target 100020; HLA-B*35:01; UGT2B11; ENSG00000213759; TAA
RANVIATAL

SEQ ID NO: 100021 - protein, 9 aa, Homo sapiens
  Table A; Target 100021; HLA-B*35:03; UGT2B11; ENSG00000213759; TAA
RANVIATAL

SEQ ID NO: 100022 - protein, 9 aa, Homo sapiens
  Table A; Target 100022; HLA-B*37:01; UGT2B11; ENSG00000213759; TAA
RANVIATAL

SEQ ID NO: 100023 - protein, 9 aa, Homo sapiens
  Table A; Target 100023; HLA-B*38:01; UGT2B11; ENSG00000213759; TAA
RANVIATAL

SEQ ID NO: 100024 - protein, 9 aa, Homo sapiens
  Table A; Target 100024; HLA-B*39:01; UGT2B11; ENSG00000213759; TAA
RANVIATAL

SEQ ID NO: 100025 - protein, 9 aa, Homo sapiens
  Table A; Target 100025; HLA-B*40:01; UGT2B11; ENSG00000213759; TAA
RANVIATAL

SEQ ID NO: 100026 - protein, 9 aa, Homo sapiens
  Table A; Target 100026; HLA-B*40:02; UGT2B11; ENSG00000213759; TAA
RANVIATAL

SEQ ID NO: 100027 - protein, 9 aa, Homo sapiens
  Table A; Target 100027; HLA-B*46:01; UGT2B11; ENSG00000213759; TAA
RANVIATAL

SEQ ID NO: 100028 - protein, 9 aa, Homo sapiens
  Table A; Target 100028; HLA-B*54:01; UGT2B11; ENSG00000213759; TAA
RANVIATAL

SEQ ID NO: 100029 - protein, 9 aa, Homo sapiens
  Table A; Target 100029; HLA-B*55:01; UGT2B11; ENSG00000213759; TAA
RANVIATAL

SEQ ID NO: 100030 - protein, 9 aa, Homo sapiens
  Table A; Target 100030; HLA-B*56:01; UGT2B11; ENSG00000213759; TAA
RANVIATAL

SEQ ID NO: 100031 - protein, 9 aa, Homo sapiens
  Table A; Target 100031; HLA-B*57:01; UGT2B11; ENSG00000213759; TAA
RANVIATAL

SEQ ID NO: 100032 - protein, 9 aa, Homo sapiens
  Table A; Target 100032; HLA-B*58:01; UGT2B11; ENSG00000213759; TAA
RANVIATAL

SEQ ID NO: 100033 - protein, 9 aa, Homo sapiens
  Table A; Target 100033; HLA-C*01:02; UGT2B11; ENSG00000213759; TAA
RANVIATAL

SEQ ID NO: 100034 - protein, 9 aa, Homo sapiens
  Table A; Target 100034; HLA-C*02:02; UGT2B11; ENSG00000213759; TAA
RANVIATAL

SEQ ID NO: 100035 - protein, 9 aa, Homo sapiens
  Table A; Target 100035; HLA-C*03:03; UGT2B11; ENSG00000213759; TAA
RANVIATAL

SEQ ID NO: 100036 - protein, 9 aa, Homo sapiens
  Table A; Target 100036; HLA-C*03:04; UGT2B11; ENSG00000213759; TAA
RANVIATAL

SEQ ID NO: 100037 - protein, 9 aa, Homo sapiens
  Table A; Target 100037; HLA-C*05:01; UGT2B11; ENSG00000213759; TAA
RANVIATAL

SEQ ID NO: 100038 - protein, 9 aa, Homo sapiens
  Table A; Target 100038; HLA-C*06:02; UGT2B11; ENSG00000213759; TAA
RANVIATAL

SEQ ID NO: 100039 - protein, 9 aa, Homo sapiens
  Table A; Target 100039; HLA-C*07:02; UGT2B11; ENSG00000213759; TAA
RANVIATAL

SEQ ID NO: 100040 - protein, 9 aa, Homo sapiens
  Table A; Target 100040; HLA-C*07:04; UGT2B11; ENSG00000213759; TAA
RANVIATAL

SEQ ID NO: 100041 - protein, 9 aa, Homo sapiens
  Table A; Target 100041; HLA-C*07:06; UGT2B11; ENSG00000213759; TAA
RANVIATAL

SEQ ID NO: 100042 - protein, 9 aa, Homo sapiens
  Table A; Target 100042; HLA-C*12:03; UGT2B11; ENSG00000213759; TAA
RANVIATAL

SEQ ID NO: 100043 - protein, 9 aa, Homo sapiens
  Table A; Target 100043; HLA-C*14:02; UGT2B11; ENSG00000213759; TAA
RANVIATAL

SEQ ID NO: 100044 - protein, 9 aa, Homo sapiens
  Table A; Target 100044; HLA-C*16:01; UGT2B11; ENSG00000213759; TAA
RANVIATAL

SEQ ID NO: 100045 - protein, 9 aa, Homo sapiens
  Table A; Target 100045; HLA-C*16:02; UGT2B11; ENSG00000213759; TAA
RANVIATAL

SEQ ID NO: 100046 - protein, 9 aa, Homo sapiens
  Table A; Target 100046; HLA-C*16:04; UGT2B11; ENSG00000213759; TAA
RANVIATAL

SEQ ID NO: 100047 - protein, 11 aa, Homo sapiens
  Table A; Target 100047; HLA-A*03:01; UGT2B11; ENSG00000213759; TAA
RANVIATALAK

SEQ ID NO: 100048 - protein, 11 aa, Homo sapiens
  Table A; Target 100048; HLA-A*03:02; UGT2B11; ENSG00000213759; TAA
RANVIATALAK

SEQ ID NO: 100049 - protein, 9 aa, Homo sapiens
  Table A; Target 100049; HLA-A*02:04; UGT2B11; ENSG00000213759; TAA
RAVFWIEFV

SEQ ID NO: 100050 - protein, 10 aa, Homo sapiens
  Table A; Target 100050; HLA-C*07:02; UGT2B11; ENSG00000213759; TAA
RFDGNKPDAL

SEQ ID NO: 100051 - protein, 8 aa, Homo sapiens
  Table A; Target 100051; HLA-A*23:01; UGT2B11; ENSG00000213759; TAA
RFTPGYTI

SEQ ID NO: 100052 - protein, 8 aa, Homo sapiens
  Table A; Target 100052; HLA-A*24:02; UGT2B11; ENSG00000213759; TAA
RFTPGYTI

SEQ ID NO: 100053 - protein, 10 aa, Homo sapiens
  Table A; Target 100053; HLA-A*31:01; UGT2B11; ENSG00000213759; TAA
RFTPGYTIER

SEQ ID NO: 100054 - protein, 8 aa, Homo sapiens
  Table A; Target 100054; HLA-B*08:01; UGT2B11; ENSG00000213759; TAA
RGHEVTVL

SEQ ID NO: 100055 - protein, 9 aa, Homo sapiens
  Table A; Target 100055; HLA-A*03:01; UGT2B11; ENSG00000213759; TAA
RIQHDQPVK

SEQ ID NO: 100056 - protein, 9 aa, Homo sapiens
  Table A; Target 100056; HLA-A*03:02; UGT2B11; ENSG00000213759; TAA
RIQHDQPVK

SEQ ID NO: 100057 - protein, 9 aa, Homo sapiens
  Table A; Target 100057; HLA-A*11:01; UGT2B11; ENSG00000213759; TAA
RIQHDQPVK

SEQ ID NO: 100058 - protein, 9 aa, Homo sapiens
  Table A; Target 100058; HLA-A*24:02; UGT2B11; ENSG00000213759; TAA
RPTTLFETM

SEQ ID NO: 100059 - protein, 9 aa, Homo sapiens
  Table A; Target 100059; HLA-B*07:02; UGT2B11; ENSG00000213759; TAA
RPTTLFETM

SEQ ID NO: 100060 - protein, 9 aa, Homo sapiens
  Table A; Target 100060; HLA-B*35:01; UGT2B11; ENSG00000213759; TAA
RPTTLFETM

SEQ ID NO: 100061 - protein, 9 aa, Homo sapiens
  Table A; Target 100061; HLA-B*35:03; UGT2B11; ENSG00000213759; TAA
RPTTLFETM

SEQ ID NO: 100062 - protein, 9 aa, Homo sapiens
  Table A; Target 100062; HLA-B*54:01; UGT2B11; ENSG00000213759; TAA
RPTTLFETM

SEQ ID NO: 100063 - protein, 9 aa, Homo sapiens
  Table A; Target 100063; HLA-B*55:01; UGT2B11; ENSG00000213759; TAA
RPTTLFETM

SEQ ID NO: 100064 - protein, 9 aa, Homo sapiens
  Table A; Target 100064; HLA-B*56:01; UGT2B11; ENSG00000213759; TAA
RPTTLFETM

SEQ ID NO: 100065 - protein, 9 aa, Homo sapiens
  Table A; Target 100065; HLA-B*57:01; UGT2B11; ENSG00000213759; TAA
RPTTLFETM

SEQ ID NO: 100066 - protein, 9 aa, Homo sapiens
  Table A; Target 100066; HLA-C*03:03; UGT2B11; ENSG00000213759; TAA
RPTTLFETM

SEQ ID NO: 100067 - protein, 9 aa, Homo sapiens
  Table A; Target 100067; HLA-C*07:02; UGT2B11; ENSG00000213759; TAA
RPTTLFETM

SEQ ID NO: 100068 - protein, 11 aa, Homo sapiens
  Table A; Target 100068; HLA-B*27:02; UGT2B11; ENSG00000213759; TAA
RPTTLFETMGK

SEQ ID NO: 100069 - protein, 9 aa, Homo sapiens
  Table A; Target 100069; HLA-A*25:01; UGT2B11; ENSG00000213759; TAA
RVAAHDLTW

SEQ ID NO: 100070 - protein, 9 aa, Homo sapiens
  Table A; Target 100070; HLA-A*32:01; UGT2B11; ENSG00000213759; TAA
RVAAHDLTW

SEQ ID NO: 100071 - protein, 9 aa, Homo sapiens
  Table A; Target 100071; HLA-B*57:01; UGT2B11; ENSG00000213759; TAA
RVAAHDLTW

SEQ ID NO: 100072 - protein, 9 aa, Homo sapiens
  Table A; Target 100072; HLA-B*58:01; UGT2B11; ENSG00000213759; TAA
RVAAHDLTW

SEQ ID NO: 100073 - protein, 9 aa, Homo sapiens
  Table A; Target 100073; HLA-A*02:04; UGT2B11; ENSG00000213759; TAA
RVKNMIYVL

SEQ ID NO: 100074 - protein, 9 aa, Homo sapiens
  Table A; Target 100074; HLA-B*08:01; UGT2B11; ENSG00000213759; TAA
RVKNMIYVL

SEQ ID NO: 100075 - protein, 10 aa, Homo sapiens
  Table A; Target 100075; HLA-A*29:02; UGT2B11; ENSG00000213759; TAA
RVKNMIYVLY

SEQ ID NO: 100076 - protein, 10 aa, Homo sapiens
  Table A; Target 100076; HLA-A*31:01; UGT2B11; ENSG00000213759; TAA
RVKNMIYVLY

SEQ ID NO: 100077 - protein, 10 aa, Homo sapiens
  Table A; Target 100077; HLA-B*57:01; UGT2B11; ENSG00000213759; TAA
RVKNMIYVLY

SEQ ID NO: 100078 - protein, 11 aa, Homo sapiens
  Table A; Target 100078; HLA-A*03:01; UGT2B11; ENSG00000213759; TAA
SCYFSSGSCGK

SEQ ID NO: 100079 - protein, 11 aa, Homo sapiens
  Table A; Target 100079; HLA-A*03:02; UGT2B11; ENSG00000213759; TAA
SCYFSSGSCGK

SEQ ID NO: 100080 - protein, 11 aa, Homo sapiens
  Table A; Target 100080; HLA-A*11:01; UGT2B11; ENSG00000213759; TAA
SCYFSSGSCGK

SEQ ID NO: 100081 - protein, 8 aa, Homo sapiens
  Table A; Target 100081; HLA-B*37:01; UGT2B11; ENSG00000213759; TAA
SDIRKDSF

SEQ ID NO: 100082 - protein, 9 aa, Homo sapiens
  Table A; Target 100082; HLA-A*11:01; UGT2B11; ENSG00000213759; TAA
SDQMTFMER

SEQ ID NO: 100083 - protein, 9 aa, Homo sapiens
  Table A; Target 100083; HLA-A*31:01; UGT2B11; ENSG00000213759; TAA
SDQMTFMER

SEQ ID NO: 100084 - protein, 9 aa, Homo sapiens
  Table A; Target 100084; HLA-A*33:01; UGT2B11; ENSG00000213759; TAA
SDQMTFMER

SEQ ID NO: 100085 - protein, 9 aa, Homo sapiens
  Table A; Target 100085; HLA-B*40:02; UGT2B11; ENSG00000213759; TAA
SEVLGRPTT

SEQ ID NO: 100086 - protein, 9 aa, Homo sapiens
  Table A; Target 100086; HLA-B*44:02; UGT2B11; ENSG00000213759; TAA
SEVLGRPTT

SEQ ID NO: 100087 - protein, 9 aa, Homo sapiens
  Table A; Target 100087; HLA-B*44:03; UGT2B11; ENSG00000213759; TAA
SEVLGRPTT

SEQ ID NO: 100088 - protein, 9 aa, Homo sapiens
  Table A; Target 100088; HLA-B*49:01; UGT2B11; ENSG00000213759; TAA
SEVLGRPTT

SEQ ID NO: 100089 - protein, 10 aa, Homo sapiens
  Table A; Target 100089; HLA-A*30:01; UGT2B11; ENSG00000213759; TAA
SEVLGRPTTL

SEQ ID NO: 100090 - protein, 10 aa, Homo sapiens
  Table A; Target 100090; HLA-B*37:01; UGT2B11; ENSG00000213759; TAA
SEVLGRPTTL

SEQ ID NO: 100091 - protein, 10 aa, Homo sapiens
  Table A; Target 100091; HLA-B*40:01; UGT2B11; ENSG00000213759; TAA
SEVLGRPTTL

SEQ ID NO: 100092 - protein, 10 aa, Homo sapiens
  Table A; Target 100092; HLA-B*40:02; UGT2B11; ENSG00000213759; TAA
SEVLGRPTTL

SEQ ID NO: 100093 - protein, 10 aa, Homo sapiens
  Table A; Target 100093; HLA-B*44:02; UGT2B11; ENSG00000213759; TAA
SEVLGRPTTL

SEQ ID NO: 100094 - protein, 10 aa, Homo sapiens
  Table A; Target 100094; HLA-B*44:03; UGT2B11; ENSG00000213759; TAA
SEVLGRPTTL

SEQ ID NO: 100095 - protein, 10 aa, Homo sapiens
  Table A; Target 100095; HLA-B*49:01; UGT2B11; ENSG00000213759; TAA
SEVLGRPTTL

SEQ ID NO: 100096 - protein, 11 aa, Homo sapiens
  Table A; Target 100096; HLA-B*44:02; UGT2B11; ENSG00000213759; TAA
SEVLGRPTTLF

SEQ ID NO: 100097 - protein, 11 aa, Homo sapiens
  Table A; Target 100097; HLA-B*44:03; UGT2B11; ENSG00000213759; TAA
SEVLGRPTTLF

SEQ ID NO: 100098 - protein, 9 aa, Homo sapiens
  Table A; Target 100098; HLA-A*24:02; UGT2B11; ENSG00000213759; TAA
SFQFPHPFL

SEQ ID NO: 100099 - protein, 8 aa, Homo sapiens
  Table A; Target 100099; HLA-C*05:01; UGT2B11; ENSG00000213759; TAA
SGENGVVV

SEQ ID NO: 100100 - protein, 9 aa, Homo sapiens
  Table A; Target 100100; HLA-B*15:03; UGT2B11; ENSG00000213759; TAA
SGENGVVVF

SEQ ID NO: 100101 - protein, 9 aa, Homo sapiens
  Table A; Target 100101; HLA-B*18:01; UGT2B11; ENSG00000213759; TAA
SGENGVVVF

SEQ ID NO: 100102 - protein, 9 aa, Homo sapiens
  Table A; Target 100102; HLA-B*27:05; UGT2B11; ENSG00000213759; TAA
SGENGVVVF

SEQ ID NO: 100103 - protein, 9 aa, Homo sapiens
  Table A; Target 100103; HLA-B*35:01; UGT2B11; ENSG00000213759; TAA
SGENGVVVF

SEQ ID NO: 100104 - protein, 9 aa, Homo sapiens
  Table A; Target 100104; HLA-B*35:03; UGT2B11; ENSG00000213759; TAA
SGENGVVVF

SEQ ID NO: 100105 - protein, 9 aa, Homo sapiens
  Table A; Target 100105; HLA-B*38:01; UGT2B11; ENSG00000213759; TAA
SGENGVVVF

SEQ ID NO: 100106 - protein, 9 aa, Homo sapiens
  Table A; Target 100106; HLA-B*39:01; UGT2B11; ENSG00000213759; TAA
SGENGVVVF

SEQ ID NO: 100107 - protein, 9 aa, Homo sapiens
  Table A; Target 100107; HLA-C*03:03; UGT2B11; ENSG00000213759; TAA
SGENGVVVF

SEQ ID NO: 100108 - protein, 9 aa, Homo sapiens
  Table A; Target 100108; HLA-C*03:04; UGT2B11; ENSG00000213759; TAA
SGENGVVVF

SEQ ID NO: 100109 - protein, 9 aa, Homo sapiens
  Table A; Target 100109; HLA-C*04:01; UGT2B11; ENSG00000213759; TAA
SGENGVVVF

SEQ ID NO: 100110 - protein, 9 aa, Homo sapiens
  Table A; Target 100110; HLA-C*05:01; UGT2B11; ENSG00000213759; TAA
SGENGVVVF

SEQ ID NO: 100111 - protein, 9 aa, Homo sapiens
  Table A; Target 100111; HLA-C*07:04; UGT2B11; ENSG00000213759; TAA
SGENGVVVF

SEQ ID NO: 100112 - protein, 9 aa, Homo sapiens
  Table A; Target 100112; HLA-C*07:06; UGT2B11; ENSG00000213759; TAA
SGENGVVVF

SEQ ID NO: 100113 - protein, 9 aa, Homo sapiens
  Table A; Target 100113; HLA-C*12:03; UGT2B11; ENSG00000213759; TAA
SGENGVVVF

SEQ ID NO: 100114 - protein, 9 aa, Homo sapiens
  Table A; Target 100114; HLA-C*16:02; UGT2B11; ENSG00000213759; TAA
SGENGVVVF

SEQ ID NO: 100115 - protein, 9 aa, Homo sapiens
  Table A; Target 100115; HLA-C*16:04; UGT2B11; ENSG00000213759; TAA
SGENGVVVF

SEQ ID NO: 100116 - protein, 9 aa, Homo sapiens
  Table A; Target 100116; HLA-A*23:01; UGT2B11; ENSG00000213759; TAA
SKLSDQMTF

SEQ ID NO: 100117 - protein, 9 aa, Homo sapiens
  Table A; Target 100117; HLA-B*15:03; UGT2B11; ENSG00000213759; TAA
SKLSDQMTF

SEQ ID NO: 100118 - protein, 9 aa, Homo sapiens
  Table A; Target 100118; HLA-B*38:01; UGT2B11; ENSG00000213759; TAA
SKLSDQMTF

SEQ ID NO: 100119 - protein, 8 aa, Homo sapiens
  Table A; Target 100119; HLA-C*04:01; UGT2B11; ENSG00000213759; TAA
SLDVIGFL

SEQ ID NO: 100120 - protein, 8 aa, Homo sapiens
  Table A; Target 100120; HLA-C*05:01; UGT2B11; ENSG00000213759; TAA
SLDVIGFL

SEQ ID NO: 100121 - protein, 9 aa, Homo sapiens
  Table A; Target 100121; HLA-A*01:01; UGT2B11; ENSG00000213759; TAA
SLDVIGFLL

SEQ ID NO: 100122 - protein, 9 aa, Homo sapiens
  Table A; Target 100122; HLA-A*02:01; UGT2B11; ENSG00000213759; TAA
SLDVIGFLL

SEQ ID NO: 100123 - protein, 9 aa, Homo sapiens
  Table A; Target 100123; HLA-A*02:04; UGT2B11; ENSG00000213759; TAA
SLDVIGFLL

SEQ ID NO: 100124 - protein, 9 aa, Homo sapiens
  Table A; Target 100124; HLA-A*02:07; UGT2B11; ENSG00000213759; TAA
SLDVIGFLL

SEQ ID NO: 100125 - protein, 9 aa, Homo sapiens
  Table A; Target 100125; HLA-B*38:01; UGT2B11; ENSG00000213759; TAA
SLDVIGFLL

SEQ ID NO: 100126 - protein, 10 aa, Homo sapiens
  Table A; Target 100126; HLA-A*02:01; UGT2B11; ENSG00000213759; TAA
SLDVIGFLLA

SEQ ID NO: 100127 - protein, 10 aa, Homo sapiens
  Table A; Target 100127; HLA-A*02:07; UGT2B11; ENSG00000213759; TAA
SLDVIGFLLA

SEQ ID NO: 100128 - protein, 9 aa, Homo sapiens
  Table A; Target 100128; HLA-A*02:01; UGT2B11; ENSG00000213759; TAA
SLGSVISNM

SEQ ID NO: 100129 - protein, 9 aa, Homo sapiens
  Table A; Target 100129; HLA-A*02:03; UGT2B11; ENSG00000213759; TAA
SLGSVISNM

SEQ ID NO: 100130 - protein, 9 aa, Homo sapiens
  Table A; Target 100130; HLA-A*02:04; UGT2B11; ENSG00000213759; TAA
SLGSVISNM

SEQ ID NO: 100131 - protein, 9 aa, Homo sapiens
  Table A; Target 100131; HLA-A*02:07; UGT2B11; ENSG00000213759; TAA
SLGSVISNM

SEQ ID NO: 100132 - protein, 9 aa, Homo sapiens
  Table A; Target 100132; HLA-A*03:01; UGT2B11; ENSG00000213759; TAA
SLGSVISNM

SEQ ID NO: 100133 - protein, 9 aa, Homo sapiens
  Table A; Target 100133; HLA-A*03:02; UGT2B11; ENSG00000213759; TAA
SLGSVISNM

SEQ ID NO: 100134 - protein, 9 aa, Homo sapiens
  Table A; Target 100134; HLA-A*26:01; UGT2B11; ENSG00000213759; TAA
SLGSVISNM

SEQ ID NO: 100135 - protein, 9 aa, Homo sapiens
  Table A; Target 100135; HLA-A*30:01; UGT2B11; ENSG00000213759; TAA
SLGSVISNM

SEQ ID NO: 100136 - protein, 9 aa, Homo sapiens
  Table A; Target 100136; HLA-A*31:01; UGT2B11; ENSG00000213759; TAA
SLGSVISNM

SEQ ID NO: 100137 - protein, 9 aa, Homo sapiens
  Table A; Target 100137; HLA-A*32:01; UGT2B11; ENSG00000213759; TAA
SLGSVISNM

SEQ ID NO: 100138 - protein, 9 aa, Homo sapiens
  Table A; Target 100138; HLA-A*68:02; UGT2B11; ENSG00000213759; TAA
SLGSVISNM

SEQ ID NO: 100139 - protein, 9 aa, Homo sapiens
  Table A; Target 100139; HLA-B*13:02; UGT2B11; ENSG00000213759; TAA
SLGSVISNM

SEQ ID NO: 100140 - protein, 9 aa, Homo sapiens
  Table A; Target 100140; HLA-B*15:01; UGT2B11; ENSG00000213759; TAA
SLGSVISNM

SEQ ID NO: 100141 - protein, 9 aa, Homo sapiens
  Table A; Target 100141; HLA-B*27:05; UGT2B11; ENSG00000213759; TAA
SLGSVISNM

SEQ ID NO: 100142 - protein, 9 aa, Homo sapiens
  Table A; Target 100142; HLA-B*37:01; UGT2B11; ENSG00000213759; TAA
SLGSVISNM

SEQ ID NO: 100143 - protein, 9 aa, Homo sapiens
  Table A; Target 100143; HLA-B*38:01; UGT2B11; ENSG00000213759; TAA
SLGSVISNM

SEQ ID NO: 100144 - protein, 9 aa, Homo sapiens
  Table A; Target 100144; HLA-B*39:01; UGT2B11; ENSG00000213759; TAA
SLGSVISNM

SEQ ID NO: 100145 - protein, 9 aa, Homo sapiens
  Table A; Target 100145; HLA-B*46:01; UGT2B11; ENSG00000213759; TAA
SLGSVISNM

SEQ ID NO: 100146 - protein, 9 aa, Homo sapiens
  Table A; Target 100146; HLA-B*55:01; UGT2B11; ENSG00000213759; TAA
SLGSVISNM

SEQ ID NO: 100147 - protein, 9 aa, Homo sapiens
  Table A; Target 100147; HLA-C*01:02; UGT2B11; ENSG00000213759; TAA
SLGSVISNM

SEQ ID NO: 100148 - protein, 9 aa, Homo sapiens
  Table A; Target 100148; HLA-C*02:02; UGT2B11; ENSG00000213759; TAA
SLGSVISNM

SEQ ID NO: 100149 - protein, 9 aa, Homo sapiens
  Table A; Target 100149; HLA-C*04:01; UGT2B11; ENSG00000213759; TAA
SLGSVISNM

SEQ ID NO: 100150 - protein, 9 aa, Homo sapiens
  Table A; Target 100150; HLA-C*06:02; UGT2B11; ENSG00000213759; TAA
SLGSVISNM

SEQ ID NO: 100151 - protein, 9 aa, Homo sapiens
  Table A; Target 100151; HLA-C*07:04; UGT2B11; ENSG00000213759; TAA
SLGSVISNM

SEQ ID NO: 100152 - protein, 9 aa, Homo sapiens
  Table A; Target 100152; HLA-C*12:03; UGT2B11; ENSG00000213759; TAA
SLGSVISNM

SEQ ID NO: 100153 - protein, 9 aa, Homo sapiens
  Table A; Target 100153; HLA-C*14:02; UGT2B11; ENSG00000213759; TAA
SLGSVISNM

SEQ ID NO: 100154 - protein, 9 aa, Homo sapiens
  Table A; Target 100154; HLA-C*16:01; UGT2B11; ENSG00000213759; TAA
SLGSVISNM

SEQ ID NO: 100155 - protein, 9 aa, Homo sapiens
  Table A; Target 100155; HLA-C*16:02; UGT2B11; ENSG00000213759; TAA
SLGSVISNM

SEQ ID NO: 100156 - protein, 11 aa, Homo sapiens
  Table A; Target 100156; HLA-A*02:01; UGT2B11; ENSG00000213759; TAA
SLGSVISNMTA

SEQ ID NO: 100157 - protein, 11 aa, Homo sapiens
  Table A; Target 100157; HLA-A*02:03; UGT2B11; ENSG00000213759; TAA
SLGSVISNMTA

SEQ ID NO: 100158 - protein, 10 aa, Homo sapiens
  Table A; Target 100158; HLA-A*02:03; UGT2B11; ENSG00000213759; TAA
SLRFTPGYTI

SEQ ID NO: 100159 - protein, 10 aa, Homo sapiens
  Table A; Target 100159; HLA-B*27:05; UGT2B11; ENSG00000213759; TAA
SRIQHDQPVK

SEQ ID NO: 100160 - protein, 10 aa, Homo sapiens
  Table A; Target 100160; HLA-C*07:04; UGT2B11; ENSG00000213759; TAA
SSGENGVVVF

SEQ ID NO: 100161 - protein, 9 aa, Homo sapiens
  Table A; Target 100161; HLA-A*02:04; UGT2B11; ENSG00000213759; TAA
SSTDLLNAL

SEQ ID NO: 100162 - protein, 9 aa, Homo sapiens
  Table A; Target 100162; HLA-A*25:01; UGT2B11; ENSG00000213759; TAA
SSTDLLNAL

SEQ ID NO: 100163 - protein, 9 aa, Homo sapiens
  Table A; Target 100163; HLA-A*32:01; UGT2B11; ENSG00000213759; TAA
SSTDLLNAL

SEQ ID NO: 100164 - protein, 9 aa, Homo sapiens
  Table A; Target 100164; HLA-A*68:02; UGT2B11; ENSG00000213759; TAA
SSTDLLNAL

SEQ ID NO: 100165 - protein, 9 aa, Homo sapiens
  Table A; Target 100165; HLA-B*18:01; UGT2B11; ENSG00000213759; TAA
SSTDLLNAL

SEQ ID NO: 100166 - protein, 9 aa, Homo sapiens
  Table A; Target 100166; HLA-B*27:05; UGT2B11; ENSG00000213759; TAA
SSTDLLNAL

SEQ ID NO: 100167 - protein, 9 aa, Homo sapiens
  Table A; Target 100167; HLA-B*35:03; UGT2B11; ENSG00000213759; TAA
SSTDLLNAL

SEQ ID NO: 100168 - protein, 9 aa, Homo sapiens
  Table A; Target 100168; HLA-B*39:01; UGT2B11; ENSG00000213759; TAA
SSTDLLNAL

SEQ ID NO: 100169 - protein, 9 aa, Homo sapiens
  Table A; Target 100169; HLA-B*40:01; UGT2B11; ENSG00000213759; TAA
SSTDLLNAL

SEQ ID NO: 100170 - protein, 9 aa, Homo sapiens
  Table A; Target 100170; HLA-B*40:02; UGT2B11; ENSG00000213759; TAA
SSTDLLNAL

SEQ ID NO: 100171 - protein, 9 aa, Homo sapiens
  Table A; Target 100171; HLA-B*46:01; UGT2B11; ENSG00000213759; TAA
SSTDLLNAL

SEQ ID NO: 100172 - protein, 9 aa, Homo sapiens
  Table A; Target 100172; HLA-B*58:01; UGT2B11; ENSG00000213759; TAA
SSTDLLNAL

SEQ ID NO: 100173 - protein, 9 aa, Homo sapiens
  Table A; Target 100173; HLA-C*01:02; UGT2B11; ENSG00000213759; TAA
SSTDLLNAL

SEQ ID NO: 100174 - protein, 9 aa, Homo sapiens
  Table A; Target 100174; HLA-C*02:02; UGT2B11; ENSG00000213759; TAA
SSTDLLNAL

SEQ ID NO: 100175 - protein, 9 aa, Homo sapiens
  Table A; Target 100175; HLA-C*03:03; UGT2B11; ENSG00000213759; TAA
SSTDLLNAL

SEQ ID NO: 100176 - protein, 9 aa, Homo sapiens
  Table A; Target 100176; HLA-C*03:04; UGT2B11; ENSG00000213759; TAA
SSTDLLNAL

SEQ ID NO: 100177 - protein, 9 aa, Homo sapiens
  Table A; Target 100177; HLA-C*06:02; UGT2B11; ENSG00000213759; TAA
SSTDLLNAL

SEQ ID NO: 100178 - protein, 9 aa, Homo sapiens
  Table A; Target 100178; HLA-C*07:04; UGT2B11; ENSG00000213759; TAA
SSTDLLNAL

SEQ ID NO: 100179 - protein, 9 aa, Homo sapiens
  Table A; Target 100179; HLA-C*07:06; UGT2B11; ENSG00000213759; TAA
SSTDLLNAL

SEQ ID NO: 100180 - protein, 9 aa, Homo sapiens
  Table A; Target 100180; HLA-C*12:03; UGT2B11; ENSG00000213759; TAA
SSTDLLNAL

SEQ ID NO: 100181 - protein, 9 aa, Homo sapiens
  Table A; Target 100181; HLA-C*14:02; UGT2B11; ENSG00000213759; TAA
SSTDLLNAL

SEQ ID NO: 100182 - protein, 9 aa, Homo sapiens
  Table A; Target 100182; HLA-C*16:01; UGT2B11; ENSG00000213759; TAA
SSTDLLNAL

SEQ ID NO: 100183 - protein, 9 aa, Homo sapiens
  Table A; Target 100183; HLA-C*16:02; UGT2B11; ENSG00000213759; TAA
SSTDLLNAL

SEQ ID NO: 100184 - protein, 10 aa, Homo sapiens
  Table A; Target 100184; HLA-A*01:01; UGT2B11; ENSG00000213759; TAA
SSTDLLNALK

SEQ ID NO: 100185 - protein, 10 aa, Homo sapiens
  Table A; Target 100185; HLA-A*03:02; UGT2B11; ENSG00000213759; TAA
SSTDLLNALK

SEQ ID NO: 100186 - protein, 10 aa, Homo sapiens
  Table A; Target 100186; HLA-A*11:01; UGT2B11; ENSG00000213759; TAA
SSTDLLNALK

SEQ ID NO: 100187 - protein, 10 aa, Homo sapiens
  Table A; Target 100187; HLA-A*68:01; UGT2B11; ENSG00000213759; TAA
SSTDLLNALK

SEQ ID NO: 100188 - protein, 10 aa, Homo sapiens
  Table A; Target 100188; HLA-A*68:02; UGT2B11; ENSG00000213759; TAA
SSTDLLNALK

SEQ ID NO: 100189 - protein, 10 aa, Homo sapiens
  Table A; Target 100189; HLA-B*27:02; UGT2B11; ENSG00000213759; TAA
SSTDLLNALK

SEQ ID NO: 100190 - protein, 10 aa, Homo sapiens
  Table A; Target 100190; HLA-B*27:05; UGT2B11; ENSG00000213759; TAA
SSTDLLNALK

SEQ ID NO: 100191 - protein, 10 aa, Homo sapiens
  Table A; Target 100191; HLA-C*06:02; UGT2B11; ENSG00000213759; TAA
SSTDLLNALK

SEQ ID NO: 100192 - protein, 10 aa, Homo sapiens
  Table A; Target 100192; HLA-C*07:06; UGT2B11; ENSG00000213759; TAA
SSTDLLNALK

SEQ ID NO: 100193 - protein, 8 aa, Homo sapiens
  Table A; Target 100193; HLA-C*04:01; UGT2B11; ENSG00000213759; TAA
STDLLNAL

SEQ ID NO: 100194 - protein, 8 aa, Homo sapiens
  Table A; Target 100194; HLA-C*05:01; UGT2B11; ENSG00000213759; TAA
STDLLNAL

SEQ ID NO: 100195 - protein, 9 aa, Homo sapiens
  Table A; Target 100195; HLA-A*01:01; UGT2B11; ENSG00000213759; TAA
STDLLNALK

SEQ ID NO: 100196 - protein, 9 aa, Homo sapiens
  Table A; Target 100196; HLA-A*03:01; UGT2B11; ENSG00000213759; TAA
STDLLNALK

SEQ ID NO: 100197 - protein, 9 aa, Homo sapiens
  Table A; Target 100197; HLA-A*03:02; UGT2B11; ENSG00000213759; TAA
STDLLNALK

SEQ ID NO: 100198 - protein, 9 aa, Homo sapiens
  Table A; Target 100198; HLA-A*11:01; UGT2B11; ENSG00000213759; TAA
STDLLNALK

SEQ ID NO: 100199 - protein, 9 aa, Homo sapiens
  Table A; Target 100199; HLA-A*68:01; UGT2B11; ENSG00000213759; TAA
STDLLNALK

SEQ ID NO: 100200 - protein, 9 aa, Homo sapiens
  Table A; Target 100200; HLA-B*27:02; UGT2B11; ENSG00000213759; TAA
STDLLNALK

SEQ ID NO: 100201 - protein, 9 aa, Homo sapiens
  Table A; Target 100201; HLA-C*07:06; UGT2B11; ENSG00000213759; TAA
STDLLNALK

SEQ ID NO: 100202 - protein, 11 aa, Homo sapiens
  Table A; Target 100202; HLA-A*02:07; UGT2B11; ENSG00000213759; TAA
STDLLNALKTV

SEQ ID NO: 100203 - protein, 8 aa, Homo sapiens
  Table A; Target 100203; HLA-B*57:01; UGT2B11; ENSG00000213759; TAA
STLKFEVY

SEQ ID NO: 100204 - protein, 8 aa, Homo sapiens
  Table A; Target 100204; HLA-B*56:01; UGT2B11; ENSG00000213759; TAA
SVISNMTA

SEQ ID NO: 100205 - protein, 9 aa, Homo sapiens
  Table A; Target 100205; HLA-A*25:01; UGT2B11; ENSG00000213759; TAA
SVISNMTAE

SEQ ID NO: 100206 - protein, 9 aa, Homo sapiens
  Table A; Target 100206; HLA-A*26:01; UGT2B11; ENSG00000213759; TAA
SVISNMTAE

SEQ ID NO: 100207 - protein, 9 aa, Homo sapiens
  Table A; Target 100207; HLA-B*46:01; UGT2B11; ENSG00000213759; TAA
SVISNMTAE

SEQ ID NO: 100208 - protein, 9 aa, Homo sapiens
  Table A; Target 100208; HLA-C*01:02; UGT2B11; ENSG00000213759; TAA
SVISNMTAE

SEQ ID NO: 100209 - protein, 10 aa, Homo sapiens
  Table A; Target 100209; HLA-A*03:02; UGT2B11; ENSG00000213759; TAA
SVISNMTAER

SEQ ID NO: 100210 - protein, 10 aa, Homo sapiens
  Table A; Target 100210; HLA-A*11:01; UGT2B11; ENSG00000213759; TAA
SVISNMTAER

SEQ ID NO: 100211 - protein, 10 aa, Homo sapiens
  Table A; Target 100211; HLA-A*25:01; UGT2B11; ENSG00000213759; TAA
SVISNMTAER

SEQ ID NO: 100212 - protein, 10 aa, Homo sapiens
  Table A; Target 100212; HLA-A*26:01; UGT2B11; ENSG00000213759; TAA
SVISNMTAER

SEQ ID NO: 100213 - protein, 10 aa, Homo sapiens
  Table A; Target 100213; HLA-A*31:01; UGT2B11; ENSG00000213759; TAA
SVISNMTAER

SEQ ID NO: 100214 - protein, 10 aa, Homo sapiens
  Table A; Target 100214; HLA-A*33:01; UGT2B11; ENSG00000213759; TAA
SVISNMTAER

SEQ ID NO: 100215 - protein, 10 aa, Homo sapiens
  Table A; Target 100215; HLA-A*33:03; UGT2B11; ENSG00000213759; TAA
SVISNMTAER

SEQ ID NO: 100216 - protein, 10 aa, Homo sapiens
  Table A; Target 100216; HLA-A*68:01; UGT2B11; ENSG00000213759; TAA
SVISNMTAER

SEQ ID NO: 100217 - protein, 10 aa, Homo sapiens
  Table A; Target 100217; HLA-A*68:02; UGT2B11; ENSG00000213759; TAA
SVISNMTAER

SEQ ID NO: 100218 - protein, 10 aa, Homo sapiens
  Table A; Target 100218; HLA-B*27:02; UGT2B11; ENSG00000213759; TAA
SVISNMTAER

SEQ ID NO: 100219 - protein, 10 aa, Homo sapiens
  Table A; Target 100219; HLA-C*07:06; UGT2B11; ENSG00000213759; TAA
SVISNMTAER

SEQ ID NO: 100220 - protein, 8 aa, Homo sapiens
  Table A; Target 100220; HLA-A*02:04; UGT2B11; ENSG00000213759; TAA
SVLLLIHL

SEQ ID NO: 100221 - protein, 9 aa, Homo sapiens
  Table A; Target 100221; HLA-A*23:01; UGT2B11; ENSG00000213759; TAA
SYIPIVMSK

SEQ ID NO: 100222 - protein, 9 aa, Homo sapiens
  Table A; Target 100222; HLA-A*24:02; UGT2B11; ENSG00000213759; TAA
SYIPIVMSK

SEQ ID NO: 100223 - protein, 9 aa, Homo sapiens
  Table A; Target 100223; HLA-A*29:02; UGT2B11; ENSG00000213759; TAA
SYIPIVMSK

SEQ ID NO: 100224 - protein, 9 aa, Homo sapiens
  Table A; Target 100224; HLA-A*31:01; UGT2B11; ENSG00000213759; TAA
SYIPIVMSK

SEQ ID NO: 100225 - protein, 9 aa, Homo sapiens
  Table A; Target 100225; HLA-A*33:03; UGT2B11; ENSG00000213759; TAA
SYIPIVMSK

SEQ ID NO: 100226 - protein, 10 aa, Homo sapiens
  Table A; Target 100226; HLA-A*23:01; UGT2B11; ENSG00000213759; TAA
SYIPIVMSKL

SEQ ID NO: 100227 - protein, 10 aa, Homo sapiens
  Table A; Target 100227; HLA-A*24:02; UGT2B11; ENSG00000213759; TAA
SYIPIVMSKL

SEQ ID NO: 100228 - protein, 8 aa, Homo sapiens
  Table A; Target 100228; HLA-B*51:01; UGT2B11; ENSG00000213759; TAA
TAERANVI

SEQ ID NO: 100229 - protein, 8 aa, Homo sapiens
  Table A; Target 100229; HLA-C*05:01; UGT2B11; ENSG00000213759; TAA
TAERANVI

SEQ ID NO: 100230 - protein, 8 aa, Homo sapiens
  Table A; Target 100230; HLA-C*07:04; UGT2B11; ENSG00000213759; TAA
TAERANVI

SEQ ID NO: 100231 - protein, 8 aa, Homo sapiens
  Table A; Target 100231; HLA-C*12:03; UGT2B11; ENSG00000213759; TAA
TAERANVI

SEQ ID NO: 100232 - protein, 8 aa, Homo sapiens
  Table A; Target 100232; HLA-C*16:02; UGT2B11; ENSG00000213759; TAA
TAERANVI

SEQ ID NO: 100233 - protein, 9 aa, Homo sapiens
  Table A; Target 100233; HLA-A*03:01; UGT2B11; ENSG00000213759; TAA
TALAKIPQK

SEQ ID NO: 100234 - protein, 9 aa, Homo sapiens
  Table A; Target 100234; HLA-A*03:02; UGT2B11; ENSG00000213759; TAA
TALAKIPQK

SEQ ID NO: 100235 - protein, 9 aa, Homo sapiens
  Table A; Target 100235; HLA-A*11:01; UGT2B11; ENSG00000213759; TAA
TALAKIPQK

SEQ ID NO: 100236 - protein, 9 aa, Homo sapiens
  Table A; Target 100236; HLA-A*31:01; UGT2B11; ENSG00000213759; TAA
TALAKIPQK

SEQ ID NO: 100237 - protein, 9 aa, Homo sapiens
  Table A; Target 100237; HLA-A*33:01; UGT2B11; ENSG00000213759; TAA
TALAKIPQK

SEQ ID NO: 100238 - protein, 9 aa, Homo sapiens
  Table A; Target 100238; HLA-A*33:03; UGT2B11; ENSG00000213759; TAA
TALAKIPQK

SEQ ID NO: 100239 - protein, 9 aa, Homo sapiens
  Table A; Target 100239; HLA-A*68:01; UGT2B11; ENSG00000213759; TAA
TALAKIPQK

SEQ ID NO: 100240 - protein, 9 aa, Homo sapiens
  Table A; Target 100240; HLA-C*07:06; UGT2B11; ENSG00000213759; TAA
TALAKIPQK

SEQ ID NO: 100241 - protein, 8 aa, Homo sapiens
  Table A; Target 100241; HLA-B*27:02; UGT2B11; ENSG00000213759; TAA
TDLLNALK

SEQ ID NO: 100242 - protein, 8 aa, Homo sapiens
  Table A; Target 100242; HLA-C*07:01; UGT2B11; ENSG00000213759; TAA
TDLLNALK

SEQ ID NO: 100243 - protein, 9 aa, Homo sapiens
  Table A; Target 100243; HLA-C*06:02; UGT2B11; ENSG00000213759; TAA
TDLLNALKT

SEQ ID NO: 100244 - protein, 9 aa, Homo sapiens
  Table A; Target 100244; HLA-C*07:01; UGT2B11; ENSG00000213759; TAA
TDLLNALKT

SEQ ID NO: 100245 - protein, 10 aa, Homo sapiens
  Table A; Target 100245; HLA-C*04:01; UGT2B11; ENSG00000213759; TAA
TDLLNALKTV

SEQ ID NO: 100246 - protein, 8 aa, Homo sapiens
  Table A; Target 100246; HLA-A*30:01; UGT2B11; ENSG00000213759; TAA
TEFENIIM

SEQ ID NO: 100247 - protein, 8 aa, Homo sapiens
  Table A; Target 100247; HLA-B*18:01; UGT2B11; ENSG00000213759; TAA
TEFENIIM

SEQ ID NO: 100248 - protein, 8 aa, Homo sapiens
  Table A; Target 100248; HLA-B*40:01; UGT2B11; ENSG00000213759; TAA
TEFENIIM

SEQ ID NO: 100249 - protein, 8 aa, Homo sapiens
  Table A; Target 100249; HLA-B*40:02; UGT2B11; ENSG00000213759; TAA
TEFENIIM

SEQ ID NO: 100250 - protein, 8 aa, Homo sapiens
  Table A; Target 100250; HLA-B*49:01; UGT2B11; ENSG00000213759; TAA
TEFENIIM

SEQ ID NO: 100251 - protein, 9 aa, Homo sapiens
  Table A; Target 100251; HLA-A*30:01; UGT2B11; ENSG00000213759; TAA
TEFENIIMQ

SEQ ID NO: 100252 - protein, 9 aa, Homo sapiens
  Table A; Target 100252; HLA-B*49:01; UGT2B11; ENSG00000213759; TAA
TEFENIIMQ

SEQ ID NO: 100253 - protein, 10 aa, Homo sapiens
  Table A; Target 100253; HLA-B*44:02; UGT2B11; ENSG00000213759; TAA
TEFENIIMQQ

SEQ ID NO: 100254 - protein, 11 aa, Homo sapiens
  Table A; Target 100254; HLA-A*30:01; UGT2B11; ENSG00000213759; TAA
TEFENIIMQQV

SEQ ID NO: 100255 - protein, 11 aa, Homo sapiens
  Table A; Target 100255; HLA-A*68:02; UGT2B11; ENSG00000213759; TAA
TEFENIIMQQV

SEQ ID NO: 100256 - protein, 11 aa, Homo sapiens
  Table A; Target 100256; HLA-B*18:01; UGT2B11; ENSG00000213759; TAA
TEFENIIMQQV

SEQ ID NO: 100257 - protein, 11 aa, Homo sapiens
  Table A; Target 100257; HLA-B*38:01; UGT2B11; ENSG00000213759; TAA
TEFENIIMQQV

SEQ ID NO: 100258 - protein, 11 aa, Homo sapiens
  Table A; Target 100258; HLA-B*40:02; UGT2B11; ENSG00000213759; TAA
TEFENIIMQQV

SEQ ID NO: 100259 - protein, 11 aa, Homo sapiens
  Table A; Target 100259; HLA-B*44:02; UGT2B11; ENSG00000213759; TAA
TEFENIIMQQV

SEQ ID NO: 100260 - protein, 11 aa, Homo sapiens
  Table A; Target 100260; HLA-B*44:03; UGT2B11; ENSG00000213759; TAA
TEFENIIMQQV

SEQ ID NO: 100261 - protein, 11 aa, Homo sapiens
  Table A; Target 100261; HLA-B*49:01; UGT2B11; ENSG00000213759; TAA
TEFENIIMQQV

SEQ ID NO: 100262 - protein, 9 aa, Homo sapiens
  Table A; Target 100262; HLA-B*08:01; UGT2B11; ENSG00000213759; TAA
TFMERVKNM

SEQ ID NO: 100263 - protein, 8 aa, Homo sapiens
  Table A; Target 100263; HLA-B*38:01; UGT2B11; ENSG00000213759; TAA
THGGANGI

SEQ ID NO: 100264 - protein, 8 aa, Homo sapiens
  Table A; Target 100264; HLA-B*39:01; UGT2B11; ENSG00000213759; TAA
THGGANGI

SEQ ID NO: 100265 - protein, 9 aa, Homo sapiens
  Table A; Target 100265; HLA-B*39:01; UGT2B11; ENSG00000213759; TAA
THGGANGIY

SEQ ID NO: 100266 - protein, 9 aa, Homo sapiens
  Table A; Target 100266; HLA-C*07:01; UGT2B11; ENSG00000213759; TAA
THGGANGIY

SEQ ID NO: 100267 - protein, 11 aa, Homo sapiens
  Table A; Target 100267; HLA-B*38:01; UGT2B11; ENSG00000213759; TAA
THGGANGIYEA

SEQ ID NO: 100268 - protein, 11 aa, Homo sapiens
  Table A; Target 100268; HLA-B*39:01; UGT2B11; ENSG00000213759; TAA
THGGANGIYEA

SEQ ID NO: 100269 - protein, 9 aa, Homo sapiens
  Table A; Target 100269; HLA-A*31:01; UGT2B11; ENSG00000213759; TAA
TILKELVQR

SEQ ID NO: 100270 - protein, 9 aa, Homo sapiens
  Table A; Target 100270; HLA-A*33:01; UGT2B11; ENSG00000213759; TAA
TILKELVQR

SEQ ID NO: 100271 - protein, 9 aa, Homo sapiens
  Table A; Target 100271; HLA-A*33:03; UGT2B11; ENSG00000213759; TAA
TILKELVQR

SEQ ID NO: 100272 - protein, 9 aa, Homo sapiens
  Table A; Target 100272; HLA-A*68:01; UGT2B11; ENSG00000213759; TAA
TILKELVQR

SEQ ID NO: 100273 - protein, 9 aa, Homo sapiens
  Table A; Target 100273; HLA-C*07:06; UGT2B11; ENSG00000213759; TAA
TILKELVQR

SEQ ID NO: 100274 - protein, 9 aa, Homo sapiens
  Table A; Target 100274; HLA-B*38:01; UGT2B11; ENSG00000213759; TAA
TKTEFENII

SEQ ID NO: 100275 - protein, 8 aa, Homo sapiens
  Table A; Target 100275; HLA-A*03:01; UGT2B11; ENSG00000213759; TAA
TLFETMGK

SEQ ID NO: 100276 - protein, 8 aa, Homo sapiens
  Table A; Target 100276; HLA-A*03:02; UGT2B11; ENSG00000213759; TAA
TLFETMGK

SEQ ID NO: 100277 - protein, 9 aa, Homo sapiens
  Table A; Target 100277; HLA-A*02:03; UGT2B11; ENSG00000213759; TAA
TLFETMGKA

SEQ ID NO: 100278 - protein, 9 aa, Homo sapiens
  Table A; Target 100278; HLA-B*55:01; UGT2B11; ENSG00000213759; TAA
TLFETMGKA

SEQ ID NO: 100279 - protein, 11 aa, Homo sapiens
  Table A; Target 100279; HLA-A*02:03; UGT2B11; ENSG00000213759; TAA
TLKFEVYPTSL

SEQ ID NO: 100280 - protein, 8 aa, Homo sapiens
  Table A; Target 100280; HLA-B*08:01; UGT2B11; ENSG00000213759; TAA
TLKWTSVL

SEQ ID NO: 100281 - protein, 9 aa, Homo sapiens
  Table A; Target 100281; HLA-A*02:03; UGT2B11; ENSG00000213759; TAA
TLKWTSVLL

SEQ ID NO: 100282 - protein, 9 aa, Homo sapiens
  Table A; Target 100282; HLA-A*02:04; UGT2B11; ENSG00000213759; TAA
TLKWTSVLL

SEQ ID NO: 100283 - protein, 11 aa, Homo sapiens
  Table A; Target 100283; HLA-C*04:01; UGT2B11; ENSG00000213759; TAA
TMSSTDLLNAL

SEQ ID NO: 100284 - protein, 8 aa, Homo sapiens
  Table A; Target 100284; HLA-A*33:03; UGT2B11; ENSG00000213759; TAA
TPGYTIER

SEQ ID NO: 100285 - protein, 8 aa, Homo sapiens
  Table A; Target 100285; HLA-A*68:01; UGT2B11; ENSG00000213759; TAA
TPGYTIER

SEQ ID NO: 100286 - protein, 8 aa, Homo sapiens
  Table A; Target 100286; HLA-B*56:01; UGT2B11; ENSG00000213759; TAA
TPGYTIER

SEQ ID NO: 100287 - protein, 8 aa, Homo sapiens
  Table A; Target 100287; HLA-C*07:06; UGT2B11; ENSG00000213759; TAA
TPGYTIER

SEQ ID NO: 100288 - protein, 9 aa, Homo sapiens
  Table A; Target 100288; HLA-C*06:02; UGT2B11; ENSG00000213759; TAA
TRAFITHGG

SEQ ID NO: 100289 - protein, 8 aa, Homo sapiens
  Table A; Target 100289; HLA-B*08:01; UGT2B11; ENSG00000213759; TAA
TSLTKTEF

SEQ ID NO: 100290 - protein, 8 aa, Homo sapiens
  Table A; Target 100290; HLA-B*58:01; UGT2B11; ENSG00000213759; TAA
TSLTKTEF

SEQ ID NO: 100291 - protein, 8 aa, Homo sapiens
  Table A; Target 100291; HLA-C*16:01; UGT2B11; ENSG00000213759; TAA
TSLTKTEF

SEQ ID NO: 100292 - protein, 9 aa, Homo sapiens
  Table A; Target 100292; HLA-A*68:02; UGT2B11; ENSG00000213759; TAA
TSVLLLIHL

SEQ ID NO: 100293 - protein, 9 aa, Homo sapiens
  Table A; Target 100293; HLA-C*06:02; UGT2B11; ENSG00000213759; TAA
TSVLLLIHL

SEQ ID NO: 100294 - protein, 9 aa, Homo sapiens
  Table A; Target 100294; HLA-A*03:01; UGT2B11; ENSG00000213759; TAA
TTLFETMGK

SEQ ID NO: 100295 - protein, 9 aa, Homo sapiens
  Table A; Target 100295; HLA-A*03:02; UGT2B11; ENSG00000213759; TAA
TTLFETMGK

SEQ ID NO: 100296 - protein, 9 aa, Homo sapiens
  Table A; Target 100296; HLA-A*11:01; UGT2B11; ENSG00000213759; TAA
TTLFETMGK

SEQ ID NO: 100297 - protein, 9 aa, Homo sapiens
  Table A; Target 100297; HLA-A*68:01; UGT2B11; ENSG00000213759; TAA
TTLFETMGK

SEQ ID NO: 100298 - protein, 9 aa, Homo sapiens
  Table A; Target 100298; HLA-B*27:02; UGT2B11; ENSG00000213759; TAA
TTLFETMGK

SEQ ID NO: 100299 - protein, 9 aa, Homo sapiens
  Table A; Target 100299; HLA-C*06:02; UGT2B11; ENSG00000213759; TAA
TTLFETMGK

SEQ ID NO: 100300 - protein, 9 aa, Homo sapiens
  Table A; Target 100300; HLA-C*07:01; UGT2B11; ENSG00000213759; TAA
TTLFETMGK

SEQ ID NO: 100301 - protein, 9 aa, Homo sapiens
  Table A; Target 100301; HLA-C*07:06; UGT2B11; ENSG00000213759; TAA
TTLFETMGK

SEQ ID NO: 100302 - protein, 8 aa, Homo sapiens
  Table A; Target 100302; HLA-A*11:01; UGT2B11; ENSG00000213759; TAA
TVIFIITK

SEQ ID NO: 100303 - protein, 8 aa, Homo sapiens
  Table A; Target 100303; HLA-B*27:02; UGT2B11; ENSG00000213759; TAA
TVIFIITK

SEQ ID NO: 100304 - protein, 9 aa, Homo sapiens
  Table A; Target 100304; HLA-A*02:03; UGT2B11; ENSG00000213759; TAA
TVIFIITKF

SEQ ID NO: 100305 - protein, 9 aa, Homo sapiens
  Table A; Target 100305; HLA-A*02:04; UGT2B11; ENSG00000213759; TAA
TVIFIITKF

SEQ ID NO: 100306 - protein, 9 aa, Homo sapiens
  Table A; Target 100306; HLA-A*02:07; UGT2B11; ENSG00000213759; TAA
TVIFIITKF

SEQ ID NO: 100307 - protein, 9 aa, Homo sapiens
  Table A; Target 100307; HLA-A*23:01; UGT2B11; ENSG00000213759; TAA
TVIFIITKF

SEQ ID NO: 100308 - protein, 9 aa, Homo sapiens
  Table A; Target 100308; HLA-A*24:02; UGT2B11; ENSG00000213759; TAA
TVIFIITKF

SEQ ID NO: 100309 - protein, 9 aa, Homo sapiens
  Table A; Target 100309; HLA-A*25:01; UGT2B11; ENSG00000213759; TAA
TVIFIITKF

SEQ ID NO: 100310 - protein, 9 aa, Homo sapiens
  Table A; Target 100310; HLA-A*26:01; UGT2B11; ENSG00000213759; TAA
TVIFIITKF

SEQ ID NO: 100311 - protein, 9 aa, Homo sapiens
  Table A; Target 100311; HLA-A*29:02; UGT2B11; ENSG00000213759; TAA
TVIFIITKF

SEQ ID NO: 100312 - protein, 9 aa, Homo sapiens
  Table A; Target 100312; HLA-A*68:01; UGT2B11; ENSG00000213759; TAA
TVIFIITKF

SEQ ID NO: 100313 - protein, 9 aa, Homo sapiens
  Table A; Target 100313; HLA-A*68:02; UGT2B11; ENSG00000213759; TAA
TVIFIITKF

SEQ ID NO: 100314 - protein, 9 aa, Homo sapiens
  Table A; Target 100314; HLA-B*15:01; UGT2B11; ENSG00000213759; TAA
TVIFIITKF

SEQ ID NO: 100315 - protein, 9 aa, Homo sapiens
  Table A; Target 100315; HLA-B*35:01; UGT2B11; ENSG00000213759; TAA
TVIFIITKF

SEQ ID NO: 100316 - protein, 9 aa, Homo sapiens
  Table A; Target 100316; HLA-B*44:02; UGT2B11; ENSG00000213759; TAA
TVIFIITKF

SEQ ID NO: 100317 - protein, 9 aa, Homo sapiens
  Table A; Target 100317; HLA-B*44:03; UGT2B11; ENSG00000213759; TAA
TVIFIITKF

SEQ ID NO: 100318 - protein, 9 aa, Homo sapiens
  Table A; Target 100318; HLA-B*57:01; UGT2B11; ENSG00000213759; TAA
TVIFIITKF

SEQ ID NO: 100319 - protein, 9 aa, Homo sapiens
  Table A; Target 100319; HLA-B*58:01; UGT2B11; ENSG00000213759; TAA
TVIFIITKF

SEQ ID NO: 100320 - protein, 9 aa, Homo sapiens
  Table A; Target 100320; HLA-C*02:02; UGT2B11; ENSG00000213759; TAA
TVIFIITKF

SEQ ID NO: 100321 - protein, 9 aa, Homo sapiens
  Table A; Target 100321; HLA-C*07:04; UGT2B11; ENSG00000213759; TAA
TVIFIITKF

SEQ ID NO: 100322 - protein, 9 aa, Homo sapiens
  Table A; Target 100322; HLA-C*12:03; UGT2B11; ENSG00000213759; TAA
TVIFIITKF

SEQ ID NO: 100323 - protein, 8 aa, Homo sapiens
  Table A; Target 100323; HLA-A*30:02; UGT2B11; ENSG00000213759; TAA
TVINDPLY

SEQ ID NO: 100324 - protein, 8 aa, Homo sapiens
  Table A; Target 100324; HLA-B*15:01; UGT2B11; ENSG00000213759; TAA
TVINDPLY

SEQ ID NO: 100325 - protein, 8 aa, Homo sapiens
  Table A; Target 100325; HLA-B*35:01; UGT2B11; ENSG00000213759; TAA
TVINDPLY

SEQ ID NO: 100326 - protein, 8 aa, Homo sapiens
  Table A; Target 100326; HLA-B*39:01; UGT2B11; ENSG00000213759; TAA
TVINDPLY

SEQ ID NO: 100327 - protein, 8 aa, Homo sapiens
  Table A; Target 100327; HLA-B*55:01; UGT2B11; ENSG00000213759; TAA
TVINDPLY

SEQ ID NO: 100328 - protein, 8 aa, Homo sapiens
  Table A; Target 100328; HLA-C*03:03; UGT2B11; ENSG00000213759; TAA
TVINDPLY

SEQ ID NO: 100329 - protein, 8 aa, Homo sapiens
  Table A; Target 100329; HLA-C*07:01; UGT2B11; ENSG00000213759; TAA
TVINDPLY

SEQ ID NO: 100330 - protein, 9 aa, Homo sapiens
  Table A; Target 100330; HLA-A*01:01; UGT2B11; ENSG00000213759; TAA
TVINDPLYK

SEQ ID NO: 100331 - protein, 9 aa, Homo sapiens
  Table A; Target 100331; HLA-A*03:01; UGT2B11; ENSG00000213759; TAA
TVINDPLYK

SEQ ID NO: 100332 - protein, 9 aa, Homo sapiens
  Table A; Target 100332; HLA-A*03:02; UGT2B11; ENSG00000213759; TAA
TVINDPLYK

SEQ ID NO: 100333 - protein, 9 aa, Homo sapiens
  Table A; Target 100333; HLA-A*11:01; UGT2B11; ENSG00000213759; TAA
TVINDPLYK

SEQ ID NO: 100334 - protein, 9 aa, Homo sapiens
  Table A; Target 100334; HLA-A*26:01; UGT2B11; ENSG00000213759; TAA
TVINDPLYK

SEQ ID NO: 100335 - protein, 9 aa, Homo sapiens
  Table A; Target 100335; HLA-A*29:02; UGT2B11; ENSG00000213759; TAA
TVINDPLYK

SEQ ID NO: 100336 - protein, 9 aa, Homo sapiens
  Table A; Target 100336; HLA-A*31:01; UGT2B11; ENSG00000213759; TAA
TVINDPLYK

SEQ ID NO: 100337 - protein, 9 aa, Homo sapiens
  Table A; Target 100337; HLA-A*33:01; UGT2B11; ENSG00000213759; TAA
TVINDPLYK

SEQ ID NO: 100338 - protein, 9 aa, Homo sapiens
  Table A; Target 100338; HLA-A*33:03; UGT2B11; ENSG00000213759; TAA
TVINDPLYK

SEQ ID NO: 100339 - protein, 9 aa, Homo sapiens
  Table A; Target 100339; HLA-A*68:01; UGT2B11; ENSG00000213759; TAA
TVINDPLYK

SEQ ID NO: 100340 - protein, 9 aa, Homo sapiens
  Table A; Target 100340; HLA-A*68:02; UGT2B11; ENSG00000213759; TAA
TVINDPLYK

SEQ ID NO: 100341 - protein, 9 aa, Homo sapiens
  Table A; Target 100341; HLA-B*13:02; UGT2B11; ENSG00000213759; TAA
TVINDPLYK

SEQ ID NO: 100342 - protein, 9 aa, Homo sapiens
  Table A; Target 100342; HLA-B*27:02; UGT2B11; ENSG00000213759; TAA
TVINDPLYK

SEQ ID NO: 100343 - protein, 9 aa, Homo sapiens
  Table A; Target 100343; HLA-B*27:05; UGT2B11; ENSG00000213759; TAA
TVINDPLYK

SEQ ID NO: 100344 - protein, 9 aa, Homo sapiens
  Table A; Target 100344; HLA-B*57:01; UGT2B11; ENSG00000213759; TAA
TVINDPLYK

SEQ ID NO: 100345 - protein, 9 aa, Homo sapiens
  Table A; Target 100345; HLA-B*58:01; UGT2B11; ENSG00000213759; TAA
TVINDPLYK

SEQ ID NO: 100346 - protein, 9 aa, Homo sapiens
  Table A; Target 100346; HLA-C*02:02; UGT2B11; ENSG00000213759; TAA
TVINDPLYK

SEQ ID NO: 100347 - protein, 9 aa, Homo sapiens
  Table A; Target 100347; HLA-C*04:01; UGT2B11; ENSG00000213759; TAA
TVINDPLYK

SEQ ID NO: 100348 - protein, 9 aa, Homo sapiens
  Table A; Target 100348; HLA-C*06:02; UGT2B11; ENSG00000213759; TAA
TVINDPLYK

SEQ ID NO: 100349 - protein, 9 aa, Homo sapiens
  Table A; Target 100349; HLA-C*07:06; UGT2B11; ENSG00000213759; TAA
TVINDPLYK

SEQ ID NO: 100350 - protein, 9 aa, Homo sapiens
  Table A; Target 100350; HLA-A*23:01; UGT2B11; ENSG00000213759; TAA
TVLASSASI

SEQ ID NO: 100351 - protein, 9 aa, Homo sapiens
  Table A; Target 100351; HLA-A*25:01; UGT2B11; ENSG00000213759; TAA
TVLASSASI

SEQ ID NO: 100352 - protein, 9 aa, Homo sapiens
  Table A; Target 100352; HLA-B*13:02; UGT2B11; ENSG00000213759; TAA
TVLASSASI

SEQ ID NO: 100353 - protein, 9 aa, Homo sapiens
  Table A; Target 100353; HLA-B*51:01; UGT2B11; ENSG00000213759; TAA
TVLASSASI

SEQ ID NO: 100354 - protein, 9 aa, Homo sapiens
  Table A; Target 100354; HLA-C*01:02; UGT2B11; ENSG00000213759; TAA
TVLASSASI

SEQ ID NO: 100355 - protein, 9 aa, Homo sapiens
  Table A; Target 100355; HLA-C*14:02; UGT2B11; ENSG00000213759; TAA
TVLASSASI

SEQ ID NO: 100356 - protein, 11 aa, Homo sapiens
  Table A; Target 100356; HLA-A*23:01; UGT2B11; ENSG00000213759; TAA
TVLASSASILF

SEQ ID NO: 100357 - protein, 8 aa, Homo sapiens
  Table A; Target 100357; HLA-B*57:01; UGT2B11; ENSG00000213759; TAA
VAAHDLTW

SEQ ID NO: 100358 - protein, 8 aa, Homo sapiens
  Table A; Target 100358; HLA-B*58:01; UGT2B11; ENSG00000213759; TAA
VAAHDLTW

SEQ ID NO: 100359 - protein, 9 aa, Homo sapiens
  Table A; Target 100359; HLA-B*57:01; UGT2B11; ENSG00000213759; TAA
VAAHDLTWF

SEQ ID NO: 100360 - protein, 8 aa, Homo sapiens
  Table A; Target 100360; HLA-A*23:01; UGT2B11; ENSG00000213759; TAA
VATVIFII

SEQ ID NO: 100361 - protein, 8 aa, Homo sapiens
  Table A; Target 100361; HLA-B*13:02; UGT2B11; ENSG00000213759; TAA
VATVIFII

SEQ ID NO: 100362 - protein, 8 aa, Homo sapiens
  Table A; Target 100362; HLA-B*51:01; UGT2B11; ENSG00000213759; TAA
VATVIFII

SEQ ID NO: 100363 - protein, 8 aa, Homo sapiens
  Table A; Target 100363; HLA-C*12:03; UGT2B11; ENSG00000213759; TAA
VATVIFII

SEQ ID NO: 100364 - protein, 9 aa, Homo sapiens
  Table A; Target 100364; HLA-C*12:03; UGT2B11; ENSG00000213759; TAA
VATVIFIIT

SEQ ID NO: 100365 - protein, 10 aa, Homo sapiens
  Table A; Target 100365; HLA-A*03:01; UGT2B11; ENSG00000213759; TAA
VDFVGGFHCK

SEQ ID NO: 100366 - protein, 10 aa, Homo sapiens
  Table A; Target 100366; HLA-A*11:01; UGT2B11; ENSG00000213759; TAA
VDFVGGFHCK

SEQ ID NO: 100367 - protein, 8 aa, Homo sapiens
  Table A; Target 100367; HLA-C*01:02; UGT2B11; ENSG00000213759; TAA
VFPCGELL

SEQ ID NO: 100368 - protein, 8 aa, Homo sapiens
  Table A; Target 100368; HLA-C*14:02; UGT2B11; ENSG00000213759; TAA
VFSLGSVI

SEQ ID NO: 100369 - protein, 8 aa, Homo sapiens
  Table A; Target 100369; HLA-A*03:01; UGT2B11; ENSG00000213759; TAA
VIATALAK

SEQ ID NO: 100370 - protein, 8 aa, Homo sapiens
  Table A; Target 100370; HLA-A*03:02; UGT2B11; ENSG00000213759; TAA
VIATALAK

SEQ ID NO: 100371 - protein, 9 aa, Homo sapiens
  Table A; Target 100371; HLA-A*02:03; UGT2B11; ENSG00000213759; TAA
VIATALAKI

SEQ ID NO: 100372 - protein, 9 aa, Homo sapiens
  Table A; Target 100372; HLA-A*23:01; UGT2B11; ENSG00000213759; TAA
VIATALAKI

SEQ ID NO: 100373 - protein, 9 aa, Homo sapiens
  Table A; Target 100373; HLA-A*24:02; UGT2B11; ENSG00000213759; TAA
VIATALAKI

SEQ ID NO: 100374 - protein, 9 aa, Homo sapiens
  Table A; Target 100374; HLA-B*13:02; UGT2B11; ENSG00000213759; TAA
VIATALAKI

SEQ ID NO: 100375 - protein, 9 aa, Homo sapiens
  Table A; Target 100375; HLA-B*46:01; UGT2B11; ENSG00000213759; TAA
VIATALAKI

SEQ ID NO: 100376 - protein, 9 aa, Homo sapiens
  Table A; Target 100376; HLA-C*06:02; UGT2B11; ENSG00000213759; TAA
VIATALAKI

SEQ ID NO: 100377 - protein, 8 aa, Homo sapiens
  Table A; Target 100377; HLA-B*18:01; UGT2B11; ENSG00000213759; TAA
VIFIITKF

SEQ ID NO: 100378 - protein, 8 aa, Homo sapiens
  Table A; Target 100378; HLA-B*57:01; UGT2B11; ENSG00000213759; TAA
VIFIITKF

SEQ ID NO: 100379 - protein, 8 aa, Homo sapiens
  Table A; Target 100379; HLA-A*01:01; UGT2B11; ENSG00000213759; TAA
VINDPLYK

SEQ ID NO: 100380 - protein, 8 aa, Homo sapiens
  Table A; Target 100380; HLA-A*03:01; UGT2B11; ENSG00000213759; TAA
VINDPLYK

SEQ ID NO: 100381 - protein, 8 aa, Homo sapiens
  Table A; Target 100381; HLA-A*03:02; UGT2B11; ENSG00000213759; TAA
VINDPLYK

SEQ ID NO: 100382 - protein, 8 aa, Homo sapiens
  Table A; Target 100382; HLA-A*11:01; UGT2B11; ENSG00000213759; TAA
VINDPLYK

SEQ ID NO: 100383 - protein, 8 aa, Homo sapiens
  Table A; Target 100383; HLA-C*06:02; UGT2B11; ENSG00000213759; TAA
VINDPLYK

SEQ ID NO: 100384 - protein, 9 aa, Homo sapiens
  Table A; Target 100384; HLA-A*03:02; UGT2B11; ENSG00000213759; TAA
VISNMTAER

SEQ ID NO: 100385 - protein, 9 aa, Homo sapiens
  Table A; Target 100385; HLA-A*11:01; UGT2B11; ENSG00000213759; TAA
VISNMTAER

SEQ ID NO: 100386 - protein, 9 aa, Homo sapiens
  Table A; Target 100386; HLA-A*31:01; UGT2B11; ENSG00000213759; TAA
VISNMTAER

SEQ ID NO: 100387 - protein, 9 aa, Homo sapiens
  Table A; Target 100387; HLA-A*33:01; UGT2B11; ENSG00000213759; TAA
VISNMTAER

SEQ ID NO: 100388 - protein, 9 aa, Homo sapiens
  Table A; Target 100388; HLA-A*33:03; UGT2B11; ENSG00000213759; TAA
VISNMTAER

SEQ ID NO: 100389 - protein, 9 aa, Homo sapiens
  Table A; Target 100389; HLA-A*68:01; UGT2B11; ENSG00000213759; TAA
VISNMTAER

SEQ ID NO: 100390 - protein, 9 aa, Homo sapiens
  Table A; Target 100390; HLA-B*27:05; UGT2B11; ENSG00000213759; TAA
VISNMTAER

SEQ ID NO: 100391 - protein, 9 aa, Homo sapiens
  Table A; Target 100391; HLA-C*07:06; UGT2B11; ENSG00000213759; TAA
VISNMTAER

SEQ ID NO: 100392 - protein, 9 aa, Homo sapiens
  Table A; Target 100392; HLA-B*15:03; UGT2B11; ENSG00000213759; TAA
VKNMIYVLY

SEQ ID NO: 100393 - protein, 9 aa, Homo sapiens
  Table A; Target 100393; HLA-B*15:03; UGT2B11; ENSG00000213759; TAA
VKPLDRAVF

SEQ ID NO: 100394 - protein, 9 aa, Homo sapiens
  Table A; Target 100394; HLA-A*02:03; UGT2B11; ENSG00000213759; TAA
VLASSASIL

SEQ ID NO: 100395 - protein, 9 aa, Homo sapiens
  Table A; Target 100395; HLA-C*01:02; UGT2B11; ENSG00000213759; TAA
VLASSASIL

SEQ ID NO: 100396 - protein, 9 aa, Homo sapiens
  Table A; Target 100396; HLA-C*03:03; UGT2B11; ENSG00000213759; TAA
VLASSASIL

SEQ ID NO: 100397 - protein, 9 aa, Homo sapiens
  Table A; Target 100397; HLA-C*03:04; UGT2B11; ENSG00000213759; TAA
VLASSASIL

SEQ ID NO: 100398 - protein, 9 aa, Homo sapiens
  Table A; Target 100398; HLA-C*07:04; UGT2B11; ENSG00000213759; TAA
VLASSASIL

SEQ ID NO: 100399 - protein, 9 aa, Homo sapiens
  Table A; Target 100399; HLA-C*14:02; UGT2B11; ENSG00000213759; TAA
VLASSASIL

SEQ ID NO: 100400 - protein, 10 aa, Homo sapiens
  Table A; Target 100400; HLA-A*23:01; UGT2B11; ENSG00000213759; TAA
VLASSASILF

SEQ ID NO: 100401 - protein, 8 aa, Homo sapiens
  Table A; Target 100401; HLA-A*02:01; UGT2B11; ENSG00000213759; TAA
VLGRPTTL

SEQ ID NO: 100402 - protein, 8 aa, Homo sapiens
  Table A; Target 100402; HLA-A*02:03; UGT2B11; ENSG00000213759; TAA
VLGRPTTL

SEQ ID NO: 100403 - protein, 8 aa, Homo sapiens
  Table A; Target 100403; HLA-A*02:04; UGT2B11; ENSG00000213759; TAA
VLGRPTTL

SEQ ID NO: 100404 - protein, 8 aa, Homo sapiens
  Table A; Target 100404; HLA-B*08:01; UGT2B11; ENSG00000213759; TAA
VLGRPTTL

SEQ ID NO: 100405 - protein, 8 aa, Homo sapiens
  Table A; Target 100405; HLA-C*12:03; UGT2B11; ENSG00000213759; TAA
VLGRPTTL

SEQ ID NO: 100406 - protein, 9 aa, Homo sapiens
  Table A; Target 100406; HLA-A*03:01; UGT2B11; ENSG00000213759; TAA
VLGRPTTLF

SEQ ID NO: 100407 - protein, 9 aa, Homo sapiens
  Table A; Target 100407; HLA-A*23:01; UGT2B11; ENSG00000213759; TAA
VLGRPTTLF

SEQ ID NO: 100408 - protein, 9 aa, Homo sapiens
  Table A; Target 100408; HLA-A*24:02; UGT2B11; ENSG00000213759; TAA
VLGRPTTLF

SEQ ID NO: 100409 - protein, 9 aa, Homo sapiens
  Table A; Target 100409; HLA-A*29:02; UGT2B11; ENSG00000213759; TAA
VLGRPTTLF

SEQ ID NO: 100410 - protein, 9 aa, Homo sapiens
  Table A; Target 100410; HLA-A*32:01; UGT2B11; ENSG00000213759; TAA
VLGRPTTLF

SEQ ID NO: 100411 - protein, 9 aa, Homo sapiens
  Table A; Target 100411; HLA-B*15:01; UGT2B11; ENSG00000213759; TAA
VLGRPTTLF

SEQ ID NO: 100412 - protein, 9 aa, Homo sapiens
  Table A; Target 100412; HLA-B*46:01; UGT2B11; ENSG00000213759; TAA
VLGRPTTLF

SEQ ID NO: 100413 - protein, 9 aa, Homo sapiens
  Table A; Target 100413; HLA-C*07:04; UGT2B11; ENSG00000213759; TAA
VLGRPTTLF

SEQ ID NO: 100414 - protein, 8 aa, Homo sapiens
  Table A; Target 100414; HLA-B*15:01; UGT2B11; ENSG00000213759; TAA
VLVWAAEY

SEQ ID NO: 100415 - protein, 8 aa, Homo sapiens
  Table A; Target 100415; HLA-B*15:03; UGT2B11; ENSG00000213759; TAA
VLVWAAEY

SEQ ID NO: 100416 - protein, 8 aa, Homo sapiens
  Table A; Target 100416; HLA-B*46:01; UGT2B11; ENSG00000213759; TAA
VLVWAAEY

SEQ ID NO: 100417 - protein, 9 aa, Homo sapiens
  Table A; Target 100417; HLA-A*31:01; UGT2B11; ENSG00000213759; TAA
VMKKLQESR

SEQ ID NO: 100418 - protein, 9 aa, Homo sapiens
  Table A; Target 100418; HLA-A*33:01; UGT2B11; ENSG00000213759; TAA
VMKKLQESR

SEQ ID NO: 100419 - protein, 9 aa, Homo sapiens
  Table A; Target 100419; HLA-A*33:03; UGT2B11; ENSG00000213759; TAA
VMKKLQESR

SEQ ID NO: 100420 - protein, 11 aa, Homo sapiens
  Table A; Target 100420; HLA-A*24:02; UGT2B11; ENSG00000213759; TAA
VMSKLSDQMTF

SEQ ID NO: 100421 - protein, 11 aa, Homo sapiens
  Table A; Target 100421; HLA-A*32:01; UGT2B11; ENSG00000213759; TAA
VMSKLSDQMTF

SEQ ID NO: 100422 - protein, 9 aa, Homo sapiens
  Table A; Target 100422; HLA-A*02:03; UGT2B11; ENSG00000213759; TAA
VQRGHEVTV

SEQ ID NO: 100423 - protein, 9 aa, Homo sapiens
  Table A; Target 100423; HLA-A*30:01; UGT2B11; ENSG00000213759; TAA
VQRGHEVTV

SEQ ID NO: 100424 - protein, 9 aa, Homo sapiens
  Table A; Target 100424; HLA-A*32:01; UGT2B11; ENSG00000213759; TAA
VQRGHEVTV

SEQ ID NO: 100425 - protein, 9 aa, Homo sapiens
  Table A; Target 100425; HLA-B*08:01; UGT2B11; ENSG00000213759; TAA
VQRGHEVTV

SEQ ID NO: 100426 - protein, 9 aa, Homo sapiens
  Table A; Target 100426; HLA-B*13:02; UGT2B11; ENSG00000213759; TAA
VQRGHEVTV

SEQ ID NO: 100427 - protein, 9 aa, Homo sapiens
  Table A; Target 100427; HLA-B*15:01; UGT2B11; ENSG00000213759; TAA
VQRGHEVTV

SEQ ID NO: 100428 - protein, 9 aa, Homo sapiens
  Table A; Target 100428; HLA-B*15:03; UGT2B11; ENSG00000213759; TAA
VQRGHEVTV

SEQ ID NO: 100429 - protein, 9 aa, Homo sapiens
  Table A; Target 100429; HLA-B*37:01; UGT2B11; ENSG00000213759; TAA
VQRGHEVTV

SEQ ID NO: 100430 - protein, 9 aa, Homo sapiens
  Table A; Target 100430; HLA-B*40:02; UGT2B11; ENSG00000213759; TAA
VQRGHEVTV

SEQ ID NO: 100431 - protein, 9 aa, Homo sapiens
  Table A; Target 100431; HLA-B*46:01; UGT2B11; ENSG00000213759; TAA
VQRGHEVTV

SEQ ID NO: 100432 - protein, 9 aa, Homo sapiens
  Table A; Target 100432; HLA-B*51:01; UGT2B11; ENSG00000213759; TAA
VQRGHEVTV

SEQ ID NO: 100433 - protein, 9 aa, Homo sapiens
  Table A; Target 100433; HLA-B*55:01; UGT2B11; ENSG00000213759; TAA
VQRGHEVTV

SEQ ID NO: 100434 - protein, 9 aa, Homo sapiens
  Table A; Target 100434; HLA-C*02:02; UGT2B11; ENSG00000213759; TAA
VQRGHEVTV

SEQ ID NO: 100435 - protein, 9 aa, Homo sapiens
  Table A; Target 100435; HLA-C*06:02; UGT2B11; ENSG00000213759; TAA
VQRGHEVTV

SEQ ID NO: 100436 - protein, 9 aa, Homo sapiens
  Table A; Target 100436; HLA-C*07:04; UGT2B11; ENSG00000213759; TAA
VQRGHEVTV

SEQ ID NO: 100437 - protein, 9 aa, Homo sapiens
  Table A; Target 100437; HLA-C*12:03; UGT2B11; ENSG00000213759; TAA
VQRGHEVTV

SEQ ID NO: 100438 - protein, 9 aa, Homo sapiens
  Table A; Target 100438; HLA-C*16:02; UGT2B11; ENSG00000213759; TAA
VQRGHEVTV

SEQ ID NO: 100439 - protein, 10 aa, Homo sapiens
  Table A; Target 100439; HLA-B*15:01; UGT2B11; ENSG00000213759; TAA
VQRGHEVTVL

SEQ ID NO: 100440 - protein, 10 aa, Homo sapiens
  Table A; Target 100440; HLA-B*40:02; UGT2B11; ENSG00000213759; TAA
VQRGHEVTVL

SEQ ID NO: 100441 - protein, 11 aa, Homo sapiens
  Table A; Target 100441; HLA-A*31:01; UGT2B11; ENSG00000213759; TAA
VQRGHEVTVLA

SEQ ID NO: 100442 - protein, 9 aa, Homo sapiens
  Table A; Target 100442; HLA-A*02:03; UGT2B11; ENSG00000213759; TAA
VQSSGENGV

SEQ ID NO: 100443 - protein, 9 aa, Homo sapiens
  Table A; Target 100443; HLA-B*13:02; UGT2B11; ENSG00000213759; TAA
VQSSGENGV

SEQ ID NO: 100444 - protein, 9 aa, Homo sapiens
  Table A; Target 100444; HLA-B*39:01; UGT2B11; ENSG00000213759; TAA
VQSSGENGV

SEQ ID NO: 100445 - protein, 10 aa, Homo sapiens
  Table A; Target 100445; HLA-B*27:05; UGT2B11; ENSG00000213759; TAA
VQSSGENGVV

SEQ ID NO: 100446 - protein, 10 aa, Homo sapiens
  Table A; Target 100446; HLA-B*39:01; UGT2B11; ENSG00000213759; TAA
VQSSGENGVV

SEQ ID NO: 100447 - protein, 11 aa, Homo sapiens
  Table A; Target 100447; HLA-B*39:01; UGT2B11; ENSG00000213759; TAA
VQSSGENGVVV

SEQ ID NO: 100448 - protein, 9 aa, Homo sapiens
  Table A; Target 100448; HLA-A*03:01; UGT2B11; ENSG00000213759; TAA
VSNKKVMKK

SEQ ID NO: 100449 - protein, 9 aa, Homo sapiens
  Table A; Target 100449; HLA-A*03:02; UGT2B11; ENSG00000213759; TAA
VSNKKVMKK

SEQ ID NO: 100450 - protein, 9 aa, Homo sapiens
  Table A; Target 100450; HLA-A*11:01; UGT2B11; ENSG00000213759; TAA
VSNKKVMKK

SEQ ID NO: 100451 - protein, 9 aa, Homo sapiens
  Table A; Target 100451; HLA-A*02:03; UGT2B11; ENSG00000213759; TAA
VVFSLGSVI

SEQ ID NO: 100452 - protein, 9 aa, Homo sapiens
  Table A; Target 100452; HLA-A*23:01; UGT2B11; ENSG00000213759; TAA
VVFSLGSVI

SEQ ID NO: 100453 - protein, 9 aa, Homo sapiens
  Table A; Target 100453; HLA-B*13:02; UGT2B11; ENSG00000213759; TAA
VVFSLGSVI

SEQ ID NO: 100454 - protein, 9 aa, Homo sapiens
  Table A; Target 100454; HLA-B*15:03; UGT2B11; ENSG00000213759; TAA
VVFSLGSVI

SEQ ID NO: 100455 - protein, 9 aa, Homo sapiens
  Table A; Target 100455; HLA-B*46:01; UGT2B11; ENSG00000213759; TAA
VVFSLGSVI

SEQ ID NO: 100456 - protein, 9 aa, Homo sapiens
  Table A; Target 100456; HLA-B*51:01; UGT2B11; ENSG00000213759; TAA
VVFSLGSVI

SEQ ID NO: 100457 - protein, 9 aa, Homo sapiens
  Table A; Target 100457; HLA-C*02:02; UGT2B11; ENSG00000213759; TAA
VVFSLGSVI

SEQ ID NO: 100458 - protein, 9 aa, Homo sapiens
  Table A; Target 100458; HLA-C*12:03; UGT2B11; ENSG00000213759; TAA
VVFSLGSVI

SEQ ID NO: 100459 - protein, 8 aa, Homo sapiens
  Table A; Target 100459; HLA-A*32:01; UGT2B11; ENSG00000213759; TAA
VVSNKKVM

SEQ ID NO: 100460 - protein, 8 aa, Homo sapiens
  Table A; Target 100460; HLA-B*08:01; UGT2B11; ENSG00000213759; TAA
VVSNKKVM

SEQ ID NO: 100461 - protein, 8 aa, Homo sapiens
  Table A; Target 100461; HLA-C*07:01; UGT2B11; ENSG00000213759; TAA
VVSNKKVM

SEQ ID NO: 100462 - protein, 8 aa, Homo sapiens
  Table A; Target 100462; HLA-C*16:01; UGT2B11; ENSG00000213759; TAA
VVSNKKVM

SEQ ID NO: 100463 - protein, 8 aa, Homo sapiens
  Table A; Target 100463; HLA-C*16:02; UGT2B11; ENSG00000213759; TAA
VVSNKKVM

SEQ ID NO: 100464 - protein, 9 aa, Homo sapiens
  Table A; Target 100464; HLA-A*03:01; UGT2B11; ENSG00000213759; TAA
VVSNKKVMK

SEQ ID NO: 100465 - protein, 9 aa, Homo sapiens
  Table A; Target 100465; HLA-A*03:02; UGT2B11; ENSG00000213759; TAA
VVSNKKVMK

SEQ ID NO: 100466 - protein, 9 aa, Homo sapiens
  Table A; Target 100466; HLA-A*11:01; UGT2B11; ENSG00000213759; TAA
VVSNKKVMK

SEQ ID NO: 100467 - protein, 10 aa, Homo sapiens
  Table A; Target 100467; HLA-A*03:01; UGT2B11; ENSG00000213759; TAA
VVSNKKVMKK

SEQ ID NO: 100468 - protein, 10 aa, Homo sapiens
  Table A; Target 100468; HLA-A*03:02; UGT2B11; ENSG00000213759; TAA
VVSNKKVMKK

SEQ ID NO: 100469 - protein, 10 aa, Homo sapiens
  Table A; Target 100469; HLA-A*11:01; UGT2B11; ENSG00000213759; TAA
VVSNKKVMKK

SEQ ID NO: 100470 - protein, 9 aa, Homo sapiens
  Table A; Target 100470; HLA-B*56:01; UGT2B11; ENSG00000213759; TAA
VVVFSLGSV

SEQ ID NO: 100471 - protein, 8 aa, Homo sapiens
  Table A; Target 100471; HLA-C*01:02; UGT2B11; ENSG00000213759; TAA
VYPTSLTK

SEQ ID NO: 100472 - protein, 8 aa, Homo sapiens
  Table A; Target 100472; HLA-C*07:01; UGT2B11; ENSG00000213759; TAA
VYPTSLTK

SEQ ID NO: 100473 - protein, 8 aa, Homo sapiens
  Table A; Target 100473; HLA-C*14:02; UGT2B11; ENSG00000213759; TAA
VYPTSLTK

SEQ ID NO: 100474 - protein, 9 aa, Homo sapiens
  Table A; Target 100474; HLA-A*23:01; UGT2B11; ENSG00000213759; TAA
VYPTSLTKT

SEQ ID NO: 100475 - protein, 9 aa, Homo sapiens
  Table A; Target 100475; HLA-A*24:02; UGT2B11; ENSG00000213759; TAA
VYPTSLTKT

SEQ ID NO: 100476 - protein, 9 aa, Homo sapiens
  Table A; Target 100476; HLA-C*01:02; UGT2B11; ENSG00000213759; TAA
VYPTSLTKT

SEQ ID NO: 100477 - protein, 9 aa, Homo sapiens
  Table A; Target 100477; HLA-C*07:01; UGT2B11; ENSG00000213759; TAA
VYPTSLTKT

SEQ ID NO: 100478 - protein, 9 aa, Homo sapiens
  Table A; Target 100478; HLA-C*07:02; UGT2B11; ENSG00000213759; TAA
VYPTSLTKT

SEQ ID NO: 100479 - protein, 9 aa, Homo sapiens
  Table A; Target 100479; HLA-C*14:02; UGT2B11; ENSG00000213759; TAA
VYPTSLTKT

SEQ ID NO: 100480 - protein, 10 aa, Homo sapiens
  Table A; Target 100480; HLA-B*07:02; UGT2B11; ENSG00000213759; TAA
VYPTSLTKTE

SEQ ID NO: 100481 - protein, 11 aa, Homo sapiens
  Table A; Target 100481; HLA-A*23:01; UGT2B11; ENSG00000213759; TAA
VYPTSLTKTEF

SEQ ID NO: 100482 - protein, 11 aa, Homo sapiens
  Table A; Target 100482; HLA-A*24:02; UGT2B11; ENSG00000213759; TAA
VYPTSLTKTEF

SEQ ID NO: 100483 - protein, 11 aa, Homo sapiens
  Table A; Target 100483; HLA-A*29:02; UGT2B11; ENSG00000213759; TAA
VYPTSLTKTEF

SEQ ID NO: 100484 - protein, 11 aa, Homo sapiens
  Table A; Target 100484; HLA-C*01:02; UGT2B11; ENSG00000213759; TAA
VYPTSLTKTEF

SEQ ID NO: 100485 - protein, 11 aa, Homo sapiens
  Table A; Target 100485; HLA-C*14:02; UGT2B11; ENSG00000213759; TAA
VYPTSLTKTEF

SEQ ID NO: 100486 - protein, 10 aa, Homo sapiens
  Table A; Target 100486; HLA-A*29:02; UGT2B11; ENSG00000213759; TAA
VYSLRFTPGY

SEQ ID NO: 100487 - protein, 10 aa, Homo sapiens
  Table A; Target 100487; HLA-B*44:02; UGT2B11; ENSG00000213759; TAA
WELYDIFRNF

SEQ ID NO: 100488 - protein, 9 aa, Homo sapiens
  Table A; Target 100488; HLA-B*57:01; UGT2B11; ENSG00000213759; TAA
WSFQFPHPF

SEQ ID NO: 100489 - protein, 8 aa, Homo sapiens
  Table A; Target 100489; HLA-B*18:01; UGT2B11; ENSG00000213759; TAA
YEAIYHGI

SEQ ID NO: 100490 - protein, 8 aa, Homo sapiens
  Table A; Target 100490; HLA-B*37:01; UGT2B11; ENSG00000213759; TAA
YEAIYHGI

SEQ ID NO: 100491 - protein, 8 aa, Homo sapiens
  Table A; Target 100491; HLA-B*44:02; UGT2B11; ENSG00000213759; TAA
YEAIYHGI

SEQ ID NO: 100492 - protein, 8 aa, Homo sapiens
  Table A; Target 100492; HLA-B*49:01; UGT2B11; ENSG00000213759; TAA
YEAIYHGI

SEQ ID NO: 100493 - protein, 8 aa, Homo sapiens
  Table A; Target 100493; HLA-C*14:02; UGT2B11; ENSG00000213759; TAA
YFSSGSCG

SEQ ID NO: 100494 - protein, 8 aa, Homo sapiens
  Table A; Target 100494; HLA-C*07:04; UGT2B11; ENSG00000213759; TAA
YHGIPMVG

SEQ ID NO: 100495 - protein, 9 aa, Homo sapiens
  Table A; Target 100495; HLA-B*38:01; UGT2B11; ENSG00000213759; TAA
YHGIPMVGI

SEQ ID NO: 100496 - protein, 9 aa, Homo sapiens
  Table A; Target 100496; HLA-B*27:02; UGT2B11; ENSG00000213759; TAA
YHSLDVIGF

SEQ ID NO: 100497 - protein, 9 aa, Homo sapiens
  Table A; Target 100497; HLA-B*38:01; UGT2B11; ENSG00000213759; TAA
YHSLDVIGF

SEQ ID NO: 100498 - protein, 9 aa, Homo sapiens
  Table A; Target 100498; HLA-B*39:01; UGT2B11; ENSG00000213759; TAA
YHSLDVIGF

SEQ ID NO: 100499 - protein, 9 aa, Homo sapiens
  Table A; Target 100499; HLA-C*07:04; UGT2B11; ENSG00000213759; TAA
YHSLDVIGF

SEQ ID NO: 100500 - protein, 10 aa, Homo sapiens
  Table A; Target 100500; HLA-B*38:01; UGT2B11; ENSG00000213759; TAA
YHSLDVIGFL

SEQ ID NO: 100501 - protein, 9 aa, Homo sapiens
  Table A; Target 100501; HLA-A*02:07; UGT2B11; ENSG00000213759; TAA
YIPIVMSKL

SEQ ID NO: 100502 - protein, 9 aa, Homo sapiens
  Table A; Target 100502; HLA-A*24:02; UGT2B11; ENSG00000213759; TAA
YIPIVMSKL

SEQ ID NO: 100503 - protein, 9 aa, Homo sapiens
  Table A; Target 100503; HLA-A*68:02; UGT2B11; ENSG00000213759; TAA
YIPIVMSKL

SEQ ID NO: 100504 - protein, 9 aa, Homo sapiens
  Table A; Target 100504; HLA-B*15:03; UGT2B11; ENSG00000213759; TAA
YKWIPQNDL

SEQ ID NO: 100505 - protein, 8 aa, Homo sapiens
  Table A; Target 100505; HLA-B*51:01; UGT2B11; ENSG00000213759; TAA
YPTSLTKT

SEQ ID NO: 100506 - protein, 8 aa, Homo sapiens
  Table A; Target 100506; HLA-B*54:01; UGT2B11; ENSG00000213759; TAA
YPTSLTKT

SEQ ID NO: 100507 - protein, 8 aa, Homo sapiens
  Table A; Target 100507; HLA-B*55:01; UGT2B11; ENSG00000213759; TAA
YPTSLTKT

SEQ ID NO: 100508 - protein, 8 aa, Homo sapiens
  Table A; Target 100508; HLA-B*56:01; UGT2B11; ENSG00000213759; TAA
YPTSLTKT

SEQ ID NO: 100509 - protein, 8 aa, Homo sapiens
  Table A; Target 100509; HLA-C*16:02; UGT2B11; ENSG00000213759; TAA
YPTSLTKT

SEQ ID NO: 100510 - protein, 10 aa, Homo sapiens
  Table A; Target 100510; HLA-A*23:01; UGT2B11; ENSG00000213759; TAA
YPTSLTKTEF

SEQ ID NO: 100511 - protein, 10 aa, Homo sapiens
  Table A; Target 100511; HLA-A*24:02; UGT2B11; ENSG00000213759; TAA
YPTSLTKTEF

SEQ ID NO: 100512 - protein, 10 aa, Homo sapiens
  Table A; Target 100512; HLA-A*25:01; UGT2B11; ENSG00000213759; TAA
YPTSLTKTEF

SEQ ID NO: 100513 - protein, 10 aa, Homo sapiens
  Table A; Target 100513; HLA-B*07:02; UGT2B11; ENSG00000213759; TAA
YPTSLTKTEF

SEQ ID NO: 100514 - protein, 10 aa, Homo sapiens
  Table A; Target 100514; HLA-B*35:01; UGT2B11; ENSG00000213759; TAA
YPTSLTKTEF

SEQ ID NO: 100515 - protein, 10 aa, Homo sapiens
  Table A; Target 100515; HLA-B*35:03; UGT2B11; ENSG00000213759; TAA
YPTSLTKTEF

SEQ ID NO: 100516 - protein, 10 aa, Homo sapiens
  Table A; Target 100516; HLA-B*38:01; UGT2B11; ENSG00000213759; TAA
YPTSLTKTEF

SEQ ID NO: 100517 - protein, 10 aa, Homo sapiens
  Table A; Target 100517; HLA-B*46:01; UGT2B11; ENSG00000213759; TAA
YPTSLTKTEF

SEQ ID NO: 100518 - protein, 10 aa, Homo sapiens
  Table A; Target 100518; HLA-B*54:01; UGT2B11; ENSG00000213759; TAA
YPTSLTKTEF

SEQ ID NO: 100519 - protein, 10 aa, Homo sapiens
  Table A; Target 100519; HLA-B*55:01; UGT2B11; ENSG00000213759; TAA
YPTSLTKTEF

SEQ ID NO: 100520 - protein, 10 aa, Homo sapiens
  Table A; Target 100520; HLA-B*56:01; UGT2B11; ENSG00000213759; TAA
YPTSLTKTEF

SEQ ID NO: 100521 - protein, 10 aa, Homo sapiens
  Table A; Target 100521; HLA-C*02:02; UGT2B11; ENSG00000213759; TAA
YPTSLTKTEF

SEQ ID NO: 100522 - protein, 10 aa, Homo sapiens
  Table A; Target 100522; HLA-C*04:01; UGT2B11; ENSG00000213759; TAA
YPTSLTKTEF

SEQ ID NO: 100523 - protein, 10 aa, Homo sapiens
  Table A; Target 100523; HLA-C*07:02; UGT2B11; ENSG00000213759; TAA
YPTSLTKTEF

SEQ ID NO: 100524 - protein, 10 aa, Homo sapiens
  Table A; Target 100524; HLA-C*14:02; UGT2B11; ENSG00000213759; TAA
YPTSLTKTEF

SEQ ID NO: 100525 - protein, 10 aa, Homo sapiens
  Table A; Target 100525; HLA-C*16:01; UGT2B11; ENSG00000213759; TAA
YPTSLTKTEF

SEQ ID NO: 100526 - protein, 10 aa, Homo sapiens
  Table A; Target 100526; HLA-C*16:02; UGT2B11; ENSG00000213759; TAA
YPTSLTKTEF

SEQ ID NO: 100527 - protein, 9 aa, Homo sapiens
  Table A; Target 100527; HLA-C*03:04; UGT2B11; ENSG00000213759; TAA
YSEVLGRPT

SEQ ID NO: 100528 - protein, 11 aa, Homo sapiens
  Table A; Target 100528; HLA-C*05:01; UGT2B11; ENSG00000213759; TAA
YSEVLGRPTTL

SEQ ID NO: 100529 - protein, 11 aa, Homo sapiens
  Table A; Target 100529; HLA-C*12:03; UGT2B11; ENSG00000213759; TAA
YSEVLGRPTTL

SEQ ID NO: 100530 - protein, 9 aa, Homo sapiens
  Table A; Target 100530; HLA-A*01:01; UGT2B11; ENSG00000213759; TAA
YSLRFTPGY

SEQ ID NO: 100531 - protein, 9 aa, Homo sapiens
  Table A; Target 100531; HLA-A*26:01; UGT2B11; ENSG00000213759; TAA
YSLRFTPGY

SEQ ID NO: 100532 - protein, 9 aa, Homo sapiens
  Table A; Target 100532; HLA-A*29:02; UGT2B11; ENSG00000213759; TAA
YSLRFTPGY

SEQ ID NO: 100533 - protein, 9 aa, Homo sapiens
  Table A; Target 100533; HLA-A*30:02; UGT2B11; ENSG00000213759; TAA
YSLRFTPGY

SEQ ID NO: 100534 - protein, 9 aa, Homo sapiens
  Table A; Target 100534; HLA-B*57:01; UGT2B11; ENSG00000213759; TAA
YSLRFTPGY

SEQ ID NO: 100535 - protein, 9 aa, Homo sapiens
  Table A; Target 100535; HLA-C*03:03; XAGE3; ENSG00000171402; CTA
AAETQVPDL

SEQ ID NO: 100536 - protein, 9 aa, Homo sapiens
  Table A; Target 100536; HLA-C*05:01; XAGE3; ENSG00000171402; CTA
AAETQVPDL

SEQ ID NO: 100537 - protein, 8 aa, Homo sapiens
  Table A; Target 100537; HLA-A*30:01; XAGE3; ENSG00000171402; CTA
AETQVPDL

SEQ ID NO: 100538 - protein, 8 aa, Homo sapiens
  Table A; Target 100538; HLA-B*18:01; XAGE3; ENSG00000171402; CTA
AETQVPDL

SEQ ID NO: 100539 - protein, 8 aa, Homo sapiens
  Table A; Target 100539; HLA-B*37:01; XAGE3; ENSG00000171402; CTA
AETQVPDL

SEQ ID NO: 100540 - protein, 8 aa, Homo sapiens
  Table A; Target 100540; HLA-B*40:01; XAGE3; ENSG00000171402; CTA
AETQVPDL

SEQ ID NO: 100541 - protein, 8 aa, Homo sapiens
  Table A; Target 100541; HLA-B*40:02; XAGE3; ENSG00000171402; CTA
AETQVPDL

SEQ ID NO: 100542 - protein, 8 aa, Homo sapiens
  Table A; Target 100542; HLA-B*44:02; XAGE3; ENSG00000171402; CTA
AETQVPDL

SEQ ID NO: 100543 - protein, 8 aa, Homo sapiens
  Table A; Target 100543; HLA-B*44:03; XAGE3; ENSG00000171402; CTA
AETQVPDL

SEQ ID NO: 100544 - protein, 8 aa, Homo sapiens
  Table A; Target 100544; HLA-B*49:01; XAGE3; ENSG00000171402; CTA
AETQVPDL

SEQ ID NO: 100545 - protein, 8 aa, Homo sapiens
  Table A; Target 100545; HLA-C*16:04; XAGE3; ENSG00000171402; CTA
AETQVPDL

SEQ ID NO: 100546 - protein, 10 aa, Homo sapiens
  Table A; Target 100546; HLA-A*30:01; XAGE3; ENSG00000171402; CTA
AETQVPDLEA

SEQ ID NO: 100547 - protein, 10 aa, Homo sapiens
  Table A; Target 100547; HLA-B*40:01; XAGE3; ENSG00000171402; CTA
AETQVPDLEA

SEQ ID NO: 100548 - protein, 10 aa, Homo sapiens
  Table A; Target 100548; HLA-B*49:01; XAGE3; ENSG00000171402; CTA
AETQVPDLEA

SEQ ID NO: 100549 - protein, 9 aa, Homo sapiens
  Table A; Target 100549; HLA-A*33:01; XAGE3; ENSG00000171402; CTA
DDQGKILPK

SEQ ID NO: 100550 - protein, 9 aa, Homo sapiens
  Table A; Target 100550; HLA-A*68:01; XAGE3; ENSG00000171402; CTA
DDQGKILPK

SEQ ID NO: 100551 - protein, 9 aa, Homo sapiens
  Table A; Target 100551; HLA-B*27:02; XAGE3; ENSG00000171402; CTA
DDQGKILPK

SEQ ID NO: 100552 - protein, 9 aa, Homo sapiens
  Table A; Target 100552; HLA-A*03:02; XAGE3; ENSG00000171402; CTA
DLQELSQSK

SEQ ID NO: 100553 - protein, 9 aa, Homo sapiens
  Table A; Target 100553; HLA-A*33:03; XAGE3; ENSG00000171402; CTA
DLQELSQSK

SEQ ID NO: 100554 - protein, 11 aa, Homo sapiens
  Table A; Target 100554; HLA-B*27:02; XAGE3; ENSG00000171402; CTA
EADLQELSQSK

SEQ ID NO: 100555 - protein, 11 aa, Homo sapiens
  Table A; Target 100555; HLA-A*33:01; XAGE3; ENSG00000171402; CTA
ESRDPAPGQER

SEQ ID NO: 100556 - protein, 11 aa, Homo sapiens
  Table A; Target 100556; HLA-A*33:03; XAGE3; ENSG00000171402; CTA
ESRDPAPGQER

SEQ ID NO: 100557 - protein, 11 aa, Homo sapiens
  Table A; Target 100557; HLA-C*07:06; XAGE3; ENSG00000171402; CTA
ESRDPAPGQER

SEQ ID NO: 100558 - protein, 9 aa, Homo sapiens
  Table A; Target 100558; HLA-B*07:02; XAGE3; ENSG00000171402; CTA
GPDDQGKIL

SEQ ID NO: 100559 - protein, 9 aa, Homo sapiens
  Table A; Target 100559; HLA-B*35:03; XAGE3; ENSG00000171402; CTA
GPDDQGKIL

SEQ ID NO: 100560 - protein, 9 aa, Homo sapiens
  Table A; Target 100560; HLA-C*07:02; XAGE3; ENSG00000171402; CTA
GPDDQGKIL

SEQ ID NO: 100561 - protein, 11 aa, Homo sapiens
  Table A; Target 100561; HLA-A*03:01; XAGE3; ENSG00000171402; CTA
GPDDQGKILPK

SEQ ID NO: 100562 - protein, 11 aa, Homo sapiens
  Table A; Target 100562; HLA-A*03:02; XAGE3; ENSG00000171402; CTA
GPDDQGKILPK

SEQ ID NO: 100563 - protein, 11 aa, Homo sapiens
  Table A; Target 100563; HLA-A*11:01; XAGE3; ENSG00000171402; CTA
GPDDQGKILPK

SEQ ID NO: 100564 - protein, 11 aa, Homo sapiens
  Table A; Target 100564; HLA-A*68:01; XAGE3; ENSG00000171402; CTA
GPDDQGKILPK

SEQ ID NO: 100565 - protein, 11 aa, Homo sapiens
  Table A; Target 100565; HLA-B*27:02; XAGE3; ENSG00000171402; CTA
GPDDQGKILPK

SEQ ID NO: 100566 - protein, 11 aa, Homo sapiens
  Table A; Target 100566; HLA-B*27:05; XAGE3; ENSG00000171402; CTA
GPDDQGKILPK

SEQ ID NO: 100567 - protein, 11 aa, Homo sapiens
  Table A; Target 100567; HLA-C*07:06; XAGE3; ENSG00000171402; CTA
GPDDQGKILPK

SEQ ID NO: 100568 - protein, 10 aa, Homo sapiens
  Table A; Target 100568; HLA-C*01:02; XAGE3; ENSG00000171402; CTA
KMPEGGDRQP

SEQ ID NO: 100569 - protein, 11 aa, Homo sapiens
  Table A; Target 100569; HLA-B*07:02; XAGE3; ENSG00000171402; CTA
MPEGGDRQPQV

SEQ ID NO: 100570 - protein, 11 aa, Homo sapiens
  Table A; Target 100570; HLA-B*35:01; XAGE3; ENSG00000171402; CTA
MPEGGDRQPQV

SEQ ID NO: 100571 - protein, 11 aa, Homo sapiens
  Table A; Target 100571; HLA-B*35:03; XAGE3; ENSG00000171402; CTA
MPEGGDRQPQV

SEQ ID NO: 100572 - protein, 11 aa, Homo sapiens
  Table A; Target 100572; HLA-B*51:01; XAGE3; ENSG00000171402; CTA
MPEGGDRQPQV

SEQ ID NO: 100573 - protein, 11 aa, Homo sapiens
  Table A; Target 100573; HLA-B*54:01; XAGE3; ENSG00000171402; CTA
MPEGGDRQPQV

SEQ ID NO: 100574 - protein, 11 aa, Homo sapiens
  Table A; Target 100574; HLA-B*55:01; XAGE3; ENSG00000171402; CTA
MPEGGDRQPQV

SEQ ID NO: 100575 - protein, 11 aa, Homo sapiens
  Table A; Target 100575; HLA-B*56:01; XAGE3; ENSG00000171402; CTA
MPEGGDRQPQV

SEQ ID NO: 100576 - protein, 11 aa, Homo sapiens
  Table A; Target 100576; HLA-C*03:03; XAGE3; ENSG00000171402; CTA
MPEGGDRQPQV

SEQ ID NO: 100577 - protein, 11 aa, Homo sapiens
  Table A; Target 100577; HLA-C*04:01; XAGE3; ENSG00000171402; CTA
MPEGGDRQPQV

SEQ ID NO: 100578 - protein, 11 aa, Homo sapiens
  Table A; Target 100578; HLA-C*06:02; XAGE3; ENSG00000171402; CTA
MPEGGDRQPQV

SEQ ID NO: 100579 - protein, 11 aa, Homo sapiens
  Table A; Target 100579; HLA-C*07:02; XAGE3; ENSG00000171402; CTA
MPEGGDRQPQV

SEQ ID NO: 100580 - protein, 11 aa, Homo sapiens
  Table A; Target 100580; HLA-C*12:03; XAGE3; ENSG00000171402; CTA
MPEGGDRQPQV

SEQ ID NO: 100581 - protein, 11 aa, Homo sapiens
  Table A; Target 100581; HLA-C*16:02; XAGE3; ENSG00000171402; CTA
MPEGGDRQPQV

SEQ ID NO: 100582 - protein, 8 aa, Homo sapiens
  Table A; Target 100582; HLA-B*58:01; XAGE3; ENSG00000171402; CTA
RSVPPPEL

SEQ ID NO: 100583 - protein, 9 aa, Homo sapiens
  Table A; Target 100583; HLA-B*57:01; XAGE3; ENSG00000171402; CTA
RSVPPPELI

SEQ ID NO: 100584 - protein, 9 aa, Homo sapiens
  Table A; Target 100584; HLA-B*58:01; XAGE3; ENSG00000171402; CTA
RSVPPPELI

SEQ ID NO: 100585 - protein, 10 aa, Homo sapiens
  Table A; Target 100585; HLA-B*27:05; XAGE3; ENSG00000171402; CTA
SRDPAPGQER

SEQ ID NO: 100586 - protein, 11 aa, Homo sapiens
  Table A; Target 100586; HLA-A*26:01; XAGE3; ENSG00000171402; CTA
SVPPPELIGPM

SEQ ID NO: 100587 - protein, 10 aa, Homo sapiens
  Table A; Target 100587; HLA-B*39:01; XAGE3; ENSG00000171402; CTA
TQVPDLEADL

SEQ ID NO: 100588 - protein, 8 aa, Homo sapiens
  Table A; Target 100588; HLA-B*35:03; XAGE3; ENSG00000171402; CTA
VPDLEADL

SEQ ID NO: 100589 - protein, 8 aa, Homo sapiens
  Table A; Target 100589; HLA-C*05:01; XAGE3; ENSG00000171402; CTA
VPDLEADL

SEQ ID NO: 100590 - protein, 11 aa, Homo sapiens
  Table A; Target 100590; HLA-B*35:01; XAGE3; ENSG00000171402; CTA
VPDLEADLQEL

SEQ ID NO: 100591 - protein, 11 aa, Homo sapiens
  Table A; Target 100591; HLA-B*35:03; XAGE3; ENSG00000171402; CTA
VPDLEADLQEL

SEQ ID NO: 100592 - protein, 11 aa, Homo sapiens
  Table A; Target 100592; HLA-B*55:01; XAGE3; ENSG00000171402; CTA
VPDLEADLQEL

SEQ ID NO: 100593 - protein, 11 aa, Homo sapiens
  Table A; Target 100593; HLA-C*05:01; XAGE3; ENSG00000171402; CTA
VPDLEADLQEL

SEQ ID NO: 100594 - protein, 10 aa, Homo sapiens
  Table A; Target 100594; HLA-B*35:01; XAGE3; ENSG00000171402; CTA
VPPPELIGPM

SEQ ID NO: 100595 - protein, 11 aa, Homo sapiens
  Table A; Target 100595; HLA-B*35:03; XAGE3; ENSG00000171402; CTA
VPPPELIGPML

SEQ ID NO: 100596 - protein, 10 aa, Homo sapiens
  Table A; Target 100596; HLA-B*27:02; XAGE3,XAGE5; ENSG00000171402,ENSG00000171405; CTA,CTA
ADLQELSQSK

SEQ ID NO: 100597 - protein, 9 aa, Homo sapiens
  Table A; Target 100597; HLA-A*33:01; XAGE3,XAGE5; ENSG00000171402,ENSG00000171405; CTA,CTA
DLQELSQSK

SEQ ID NO: 100598 - protein, 10 aa, Homo sapiens
  Table A; Target 100598; HLA-B*15:03; XAGE3,XAGE5; ENSG00000171402,ENSG00000171405; CTA,CTA
GKILPKSEQF

SEQ ID NO: 100599 - protein, 9 aa, Homo sapiens
  Table A; Target 100599; HLA-A*23:01; XAGE3,XAGE5; ENSG00000171402,ENSG00000171405; CTA,CTA
KILPKSEQF

SEQ ID NO: 100600 - protein, 9 aa, Homo sapiens
  Table A; Target 100600; HLA-A*24:02; XAGE3,XAGE5; ENSG00000171402,ENSG00000171405; CTA,CTA
KILPKSEQF

SEQ ID NO: 100601 - protein, 9 aa, Homo sapiens
  Table A; Target 100601; HLA-A*30:02; XAGE3,XAGE5; ENSG00000171402,ENSG00000171405; CTA,CTA
KILPKSEQF

SEQ ID NO: 100602 - protein, 9 aa, Homo sapiens
  Table A; Target 100602; HLA-A*31:01; XAGE3,XAGE5; ENSG00000171402,ENSG00000171405; CTA,CTA
KILPKSEQF

SEQ ID NO: 100603 - protein, 9 aa, Homo sapiens
  Table A; Target 100603; HLA-A*32:01; XAGE3,XAGE5; ENSG00000171402,ENSG00000171405; CTA,CTA
KILPKSEQF

SEQ ID NO: 100604 - protein, 9 aa, Homo sapiens
  Table A; Target 100604; HLA-B*15:01; XAGE3,XAGE5; ENSG00000171402,ENSG00000171405; CTA,CTA
KILPKSEQF

SEQ ID NO: 100605 - protein, 9 aa, Homo sapiens
  Table A; Target 100605; HLA-B*37:01; XAGE3,XAGE5; ENSG00000171402,ENSG00000171405; CTA,CTA
KILPKSEQF

SEQ ID NO: 100606 - protein, 9 aa, Homo sapiens
  Table A; Target 100606; HLA-B*57:01; XAGE3,XAGE5; ENSG00000171402,ENSG00000171405; CTA,CTA
KILPKSEQF

SEQ ID NO: 100607 - protein, 9 aa, Homo sapiens
  Table A; Target 100607; HLA-B*58:01; XAGE3,XAGE5; ENSG00000171402,ENSG00000171405; CTA,CTA
KILPKSEQF

SEQ ID NO: 100608 - protein, 10 aa, Homo sapiens
  Table A; Target 100608; HLA-A*03:01; XAGE3,XAGE5; ENSG00000171402,ENSG00000171405; CTA,CTA
KILPKSEQFK

SEQ ID NO: 100609 - protein, 8 aa, Homo sapiens
  Table A; Target 100609; HLA-A*30:01; XAGE3,XAGE5; ENSG00000171402,ENSG00000171405; CTA,CTA
LEADLQEL

SEQ ID NO: 100610 - protein, 8 aa, Homo sapiens
  Table A; Target 100610; HLA-B*18:01; XAGE3,XAGE5; ENSG00000171402,ENSG00000171405; CTA,CTA
LEADLQEL

SEQ ID NO: 100611 - protein, 8 aa, Homo sapiens
  Table A; Target 100611; HLA-B*40:01; XAGE3,XAGE5; ENSG00000171402,ENSG00000171405; CTA,CTA
LEADLQEL

SEQ ID NO: 100612 - protein, 8 aa, Homo sapiens
  Table A; Target 100612; HLA-B*49:01; XAGE3,XAGE5; ENSG00000171402,ENSG00000171405; CTA,CTA
LEADLQEL

SEQ ID NO: 100613 - protein, 9 aa, Homo sapiens
  Table A; Target 100613; HLA-C*05:01; XAGE5; ENSG00000171405; CTA
AAEIQVPNL

SEQ ID NO: 100614 - protein, 8 aa, Homo sapiens
  Table A; Target 100614; HLA-A*30:01; XAGE5; ENSG00000171405; CTA
AEIQVPNL

SEQ ID NO: 100615 - protein, 8 aa, Homo sapiens
  Table A; Target 100615; HLA-B*18:01; XAGE5; ENSG00000171405; CTA
AEIQVPNL

SEQ ID NO: 100616 - protein, 8 aa, Homo sapiens
  Table A; Target 100616; HLA-B*27:02; XAGE5; ENSG00000171405; CTA
AEIQVPNL

SEQ ID NO: 100617 - protein, 8 aa, Homo sapiens
  Table A; Target 100617; HLA-B*37:01; XAGE5; ENSG00000171405; CTA
AEIQVPNL

SEQ ID NO: 100618 - protein, 8 aa, Homo sapiens
  Table A; Target 100618; HLA-B*40:01; XAGE5; ENSG00000171405; CTA
AEIQVPNL

SEQ ID NO: 100619 - protein, 8 aa, Homo sapiens
  Table A; Target 100619; HLA-B*40:02; XAGE5; ENSG00000171405; CTA
AEIQVPNL

SEQ ID NO: 100620 - protein, 8 aa, Homo sapiens
  Table A; Target 100620; HLA-B*44:02; XAGE5; ENSG00000171405; CTA
AEIQVPNL

SEQ ID NO: 100621 - protein, 8 aa, Homo sapiens
  Table A; Target 100621; HLA-B*44:03; XAGE5; ENSG00000171405; CTA
AEIQVPNL

SEQ ID NO: 100622 - protein, 8 aa, Homo sapiens
  Table A; Target 100622; HLA-B*49:01; XAGE5; ENSG00000171405; CTA
AEIQVPNL

SEQ ID NO: 100623 - protein, 10 aa, Homo sapiens
  Table A; Target 100623; HLA-A*30:01; XAGE5; ENSG00000171405; CTA
AEIQVPNLEA

SEQ ID NO: 100624 - protein, 10 aa, Homo sapiens
  Table A; Target 100624; HLA-B*40:01; XAGE5; ENSG00000171405; CTA
AEIQVPNLEA

SEQ ID NO: 100625 - protein, 10 aa, Homo sapiens
  Table A; Target 100625; HLA-B*44:02; XAGE5; ENSG00000171405; CTA
AEIQVPNLEA

SEQ ID NO: 100626 - protein, 10 aa, Homo sapiens
  Table A; Target 100626; HLA-B*44:03; XAGE5; ENSG00000171405; CTA
AEIQVPNLEA

SEQ ID NO: 100627 - protein, 10 aa, Homo sapiens
  Table A; Target 100627; HLA-B*49:01; XAGE5; ENSG00000171405; CTA
AEIQVPNLEA

SEQ ID NO: 100628 - protein, 8 aa, Homo sapiens
  Table A; Target 100628; HLA-B*13:02; XAGE5; ENSG00000171405; CTA
AQLVGPML

SEQ ID NO: 100629 - protein, 8 aa, Homo sapiens
  Table A; Target 100629; HLA-B*15:01; XAGE5; ENSG00000171405; CTA
AQLVGPML

SEQ ID NO: 100630 - protein, 8 aa, Homo sapiens
  Table A; Target 100630; HLA-B*15:03; XAGE5; ENSG00000171405; CTA
AQLVGPML

SEQ ID NO: 100631 - protein, 8 aa, Homo sapiens
  Table A; Target 100631; HLA-C*03:04; XAGE5; ENSG00000171405; CTA
AQLVGPML

SEQ ID NO: 100632 - protein, 9 aa, Homo sapiens
  Table A; Target 100632; HLA-B*51:01; XAGE5; ENSG00000171405; CTA
DSPDVQGKI

SEQ ID NO: 100633 - protein, 9 aa, Homo sapiens
  Table A; Target 100633; HLA-A*03:02; XAGE5; ENSG00000171405; CTA
DVQGKILPK

SEQ ID NO: 100634 - protein, 9 aa, Homo sapiens
  Table A; Target 100634; HLA-A*11:01; XAGE5; ENSG00000171405; CTA
DVQGKILPK

SEQ ID NO: 100635 - protein, 9 aa, Homo sapiens
  Table A; Target 100635; HLA-A*33:01; XAGE5; ENSG00000171405; CTA
DVQGKILPK

SEQ ID NO: 100636 - protein, 9 aa, Homo sapiens
  Table A; Target 100636; HLA-A*33:03; XAGE5; ENSG00000171405; CTA
DVQGKILPK

SEQ ID NO: 100637 - protein, 9 aa, Homo sapiens
  Table A; Target 100637; HLA-A*68:01; XAGE5; ENSG00000171405; CTA
DVQGKILPK

SEQ ID NO: 100638 - protein, 9 aa, Homo sapiens
  Table A; Target 100638; HLA-C*07:06; XAGE5; ENSG00000171405; CTA
DVQGKILPK

SEQ ID NO: 100639 - protein, 11 aa, Homo sapiens
  Table A; Target 100639; HLA-A*33:01; XAGE5; ENSG00000171405; CTA
ESQDHTPGQKR

SEQ ID NO: 100640 - protein, 11 aa, Homo sapiens
  Table A; Target 100640; HLA-A*33:03; XAGE5; ENSG00000171405; CTA
ESQDHTPGQKR

SEQ ID NO: 100641 - protein, 11 aa, Homo sapiens
  Table A; Target 100641; HLA-A*68:01; XAGE5; ENSG00000171405; CTA
ESQDHTPGQKR

SEQ ID NO: 100642 - protein, 10 aa, Homo sapiens
  Table A; Target 100642; HLA-B*49:01; XAGE5; ENSG00000171405; CTA
GDSPDVQGKI

SEQ ID NO: 100643 - protein, 8 aa, Homo sapiens
  Table A; Target 100643; HLA-A*24:02; XAGE5; ENSG00000171405; CTA
ILPKSEQF

SEQ ID NO: 100644 - protein, 9 aa, Homo sapiens
  Table A; Target 100644; HLA-B*35:03; XAGE5; ENSG00000171405; CTA
LAQLVGPML

SEQ ID NO: 100645 - protein, 9 aa, Homo sapiens
  Table A; Target 100645; HLA-B*51:01; XAGE5; ENSG00000171405; CTA
LAQLVGPML

SEQ ID NO: 100646 - protein, 9 aa, Homo sapiens
  Table A; Target 100646; HLA-C*03:03; XAGE5; ENSG00000171405; CTA
LAQLVGPML

SEQ ID NO: 100647 - protein, 9 aa, Homo sapiens
  Table A; Target 100647; HLA-C*03:04; XAGE5; ENSG00000171405; CTA
LAQLVGPML

SEQ ID NO: 100648 - protein, 11 aa, Homo sapiens
  Table A; Target 100648; HLA-B*07:02; XAGE5; ENSG00000171405; CTA
MPEGGEGKPQL

SEQ ID NO: 100649 - protein, 11 aa, Homo sapiens
  Table A; Target 100649; HLA-B*35:01; XAGE5; ENSG00000171405; CTA
MPEGGEGKPQL

SEQ ID NO: 100650 - protein, 11 aa, Homo sapiens
  Table A; Target 100650; HLA-B*35:03; XAGE5; ENSG00000171405; CTA
MPEGGEGKPQL

SEQ ID NO: 100651 - protein, 11 aa, Homo sapiens
  Table A; Target 100651; HLA-B*38:01; XAGE5; ENSG00000171405; CTA
MPEGGEGKPQL

SEQ ID NO: 100652 - protein, 11 aa, Homo sapiens
  Table A; Target 100652; HLA-B*39:01; XAGE5; ENSG00000171405; CTA
MPEGGEGKPQL

SEQ ID NO: 100653 - protein, 11 aa, Homo sapiens
  Table A; Target 100653; HLA-B*54:01; XAGE5; ENSG00000171405; CTA
MPEGGEGKPQL

SEQ ID NO: 100654 - protein, 11 aa, Homo sapiens
  Table A; Target 100654; HLA-B*55:01; XAGE5; ENSG00000171405; CTA
MPEGGEGKPQL

SEQ ID NO: 100655 - protein, 11 aa, Homo sapiens
  Table A; Target 100655; HLA-C*03:03; XAGE5; ENSG00000171405; CTA
MPEGGEGKPQL

SEQ ID NO: 100656 - protein, 11 aa, Homo sapiens
  Table A; Target 100656; HLA-C*04:01; XAGE5; ENSG00000171405; CTA
MPEGGEGKPQL

SEQ ID NO: 100657 - protein, 11 aa, Homo sapiens
  Table A; Target 100657; HLA-C*05:01; XAGE5; ENSG00000171405; CTA
MPEGGEGKPQL

SEQ ID NO: 100658 - protein, 11 aa, Homo sapiens
  Table A; Target 100658; HLA-C*07:02; XAGE5; ENSG00000171405; CTA
MPEGGEGKPQL

SEQ ID NO: 100659 - protein, 11 aa, Homo sapiens
  Table A; Target 100659; HLA-C*07:06; XAGE5; ENSG00000171405; CTA
MPEGGEGKPQL

SEQ ID NO: 100660 - protein, 10 aa, Homo sapiens
  Table A; Target 100660; HLA-B*40:02; XAGE5; ENSG00000171405; CTA
PEGGEGKPQL

SEQ ID NO: 100661 - protein, 10 aa, Homo sapiens
  Table A; Target 100661; HLA-B*40:01; XAGE5; ENSG00000171405; CTA
REDDQGAAEI

SEQ ID NO: 100662 - protein, 10 aa, Homo sapiens
  Table A; Target 100662; HLA-B*44:02; XAGE5; ENSG00000171405; CTA
REDDQGAAEI

SEQ ID NO: 100663 - protein, 10 aa, Homo sapiens
  Table A; Target 100663; HLA-B*44:03; XAGE5; ENSG00000171405; CTA
REDDQGAAEI

SEQ ID NO: 100664 - protein, 10 aa, Homo sapiens
  Table A; Target 100664; HLA-B*49:01; XAGE5; ENSG00000171405; CTA
REDDQGAAEI

SEQ ID NO: 100665 - protein, 10 aa, Homo sapiens
  Table A; Target 100665; HLA-A*02:01; XAGE5; ENSG00000171405; CTA
RLAQLVGPML

SEQ ID NO: 100666 - protein, 10 aa, Homo sapiens
  Table A; Target 100666; HLA-A*02:04; XAGE5; ENSG00000171405; CTA
RLAQLVGPML

SEQ ID NO: 100667 - protein, 9 aa, Homo sapiens
  Table A; Target 100667; HLA-B*07:02; XAGE5; ENSG00000171405; CTA
SPDVQGKIL

SEQ ID NO: 100668 - protein, 9 aa, Homo sapiens
  Table A; Target 100668; HLA-B*35:03; XAGE5; ENSG00000171405; CTA
SPDVQGKIL

SEQ ID NO: 100669 - protein, 9 aa, Homo sapiens
  Table A; Target 100669; HLA-C*07:02; XAGE5; ENSG00000171405; CTA
SPDVQGKIL

SEQ ID NO: 100670 - protein, 11 aa, Homo sapiens
  Table A; Target 100670; HLA-B*35:03; XAGE5; ENSG00000171405; CTA
VPNLEADLQEL

SEQ ID NO: 100671 - protein, 8 aa, Homo sapiens
  Table A; Target 100671; HLA-B*08:01; ZFP42; ENSG00000179059; CTA
AALRKHLL

SEQ ID NO: 100672 - protein, 9 aa, Homo sapiens
  Table A; Target 100672; HLA-B*40:02; ZFP42; ENSG00000179059; CTA
AEFARKKPP

SEQ ID NO: 100673 - protein, 8 aa, Homo sapiens
  Table A; Target 100673; HLA-A*30:01; ZFP42; ENSG00000179059; CTA
AEIEPVSA

SEQ ID NO: 100674 - protein, 8 aa, Homo sapiens
  Table A; Target 100674; HLA-B*18:01; ZFP42; ENSG00000179059; CTA
AEIEPVSA

SEQ ID NO: 100675 - protein, 8 aa, Homo sapiens
  Table A; Target 100675; HLA-B*37:01; ZFP42; ENSG00000179059; CTA
AEIEPVSA

SEQ ID NO: 100676 - protein, 8 aa, Homo sapiens
  Table A; Target 100676; HLA-B*40:01; ZFP42; ENSG00000179059; CTA
AEIEPVSA

SEQ ID NO: 100677 - protein, 8 aa, Homo sapiens
  Table A; Target 100677; HLA-B*40:02; ZFP42; ENSG00000179059; CTA
AEIEPVSA

SEQ ID NO: 100678 - protein, 8 aa, Homo sapiens
  Table A; Target 100678; HLA-B*49:01; ZFP42; ENSG00000179059; CTA
AEIEPVSA

SEQ ID NO: 100679 - protein, 9 aa, Homo sapiens
  Table A; Target 100679; HLA-A*02:01; ZFP42; ENSG00000179059; CTA
AEIEPVSAV

SEQ ID NO: 100680 - protein, 9 aa, Homo sapiens
  Table A; Target 100680; HLA-A*02:03; ZFP42; ENSG00000179059; CTA
AEIEPVSAV

SEQ ID NO: 100681 - protein, 9 aa, Homo sapiens
  Table A; Target 100681; HLA-A*30:01; ZFP42; ENSG00000179059; CTA
AEIEPVSAV

SEQ ID NO: 100682 - protein, 9 aa, Homo sapiens
  Table A; Target 100682; HLA-B*13:02; ZFP42; ENSG00000179059; CTA
AEIEPVSAV

SEQ ID NO: 100683 - protein, 9 aa, Homo sapiens
  Table A; Target 100683; HLA-B*15:01; ZFP42; ENSG00000179059; CTA
AEIEPVSAV

SEQ ID NO: 100684 - protein, 9 aa, Homo sapiens
  Table A; Target 100684; HLA-B*18:01; ZFP42; ENSG00000179059; CTA
AEIEPVSAV

SEQ ID NO: 100685 - protein, 9 aa, Homo sapiens
  Table A; Target 100685; HLA-B*27:02; ZFP42; ENSG00000179059; CTA
AEIEPVSAV

SEQ ID NO: 100686 - protein, 9 aa, Homo sapiens
  Table A; Target 100686; HLA-B*27:05; ZFP42; ENSG00000179059; CTA
AEIEPVSAV

SEQ ID NO: 100687 - protein, 9 aa, Homo sapiens
  Table A; Target 100687; HLA-B*37:01; ZFP42; ENSG00000179059; CTA
AEIEPVSAV

SEQ ID NO: 100688 - protein, 9 aa, Homo sapiens
  Table A; Target 100688; HLA-B*40:01; ZFP42; ENSG00000179059; CTA
AEIEPVSAV

SEQ ID NO: 100689 - protein, 9 aa, Homo sapiens
  Table A; Target 100689; HLA-B*40:02; ZFP42; ENSG00000179059; CTA
AEIEPVSAV

SEQ ID NO: 100690 - protein, 9 aa, Homo sapiens
  Table A; Target 100690; HLA-B*44:02; ZFP42; ENSG00000179059; CTA
AEIEPVSAV

SEQ ID NO: 100691 - protein, 9 aa, Homo sapiens
  Table A; Target 100691; HLA-B*44:03; ZFP42; ENSG00000179059; CTA
AEIEPVSAV

SEQ ID NO: 100692 - protein, 9 aa, Homo sapiens
  Table A; Target 100692; HLA-B*56:01; ZFP42; ENSG00000179059; CTA
AEIEPVSAV

SEQ ID NO: 100693 - protein, 9 aa, Homo sapiens
  Table A; Target 100693; HLA-C*02:02; ZFP42; ENSG00000179059; CTA
AEIEPVSAV

SEQ ID NO: 100694 - protein, 9 aa, Homo sapiens
  Table A; Target 100694; HLA-C*03:04; ZFP42; ENSG00000179059; CTA
AEIEPVSAV

SEQ ID NO: 100695 - protein, 9 aa, Homo sapiens
  Table A; Target 100695; HLA-C*14:02; ZFP42; ENSG00000179059; CTA
AEIEPVSAV

SEQ ID NO: 100696 - protein, 9 aa, Homo sapiens
  Table A; Target 100696; HLA-C*16:04; ZFP42; ENSG00000179059; CTA
AEIEPVSAV

SEQ ID NO: 100697 - protein, 10 aa, Homo sapiens
  Table A; Target 100697; HLA-A*25:01; ZFP42; ENSG00000179059; CTA
AEIEPVSAVW

SEQ ID NO: 100698 - protein, 10 aa, Homo sapiens
  Table A; Target 100698; HLA-A*30:01; ZFP42; ENSG00000179059; CTA
AEIEPVSAVW

SEQ ID NO: 100699 - protein, 10 aa, Homo sapiens
  Table A; Target 100699; HLA-B*18:01; ZFP42; ENSG00000179059; CTA
AEIEPVSAVW

SEQ ID NO: 100700 - protein, 10 aa, Homo sapiens
  Table A; Target 100700; HLA-B*27:02; ZFP42; ENSG00000179059; CTA
AEIEPVSAVW

SEQ ID NO: 100701 - protein, 10 aa, Homo sapiens
  Table A; Target 100701; HLA-B*27:05; ZFP42; ENSG00000179059; CTA
AEIEPVSAVW

SEQ ID NO: 100702 - protein, 10 aa, Homo sapiens
  Table A; Target 100702; HLA-B*37:01; ZFP42; ENSG00000179059; CTA
AEIEPVSAVW

SEQ ID NO: 100703 - protein, 10 aa, Homo sapiens
  Table A; Target 100703; HLA-B*40:01; ZFP42; ENSG00000179059; CTA
AEIEPVSAVW

SEQ ID NO: 100704 - protein, 10 aa, Homo sapiens
  Table A; Target 100704; HLA-B*40:02; ZFP42; ENSG00000179059; CTA
AEIEPVSAVW

SEQ ID NO: 100705 - protein, 10 aa, Homo sapiens
  Table A; Target 100705; HLA-B*49:01; ZFP42; ENSG00000179059; CTA
AEIEPVSAVW

SEQ ID NO: 100706 - protein, 10 aa, Homo sapiens
  Table A; Target 100706; HLA-B*57:01; ZFP42; ENSG00000179059; CTA
AEIEPVSAVW

SEQ ID NO: 100707 - protein, 10 aa, Homo sapiens
  Table A; Target 100707; HLA-B*58:01; ZFP42; ENSG00000179059; CTA
AEIEPVSAVW

SEQ ID NO: 100708 - protein, 10 aa, Homo sapiens
  Table A; Target 100708; HLA-C*02:02; ZFP42; ENSG00000179059; CTA
AEIEPVSAVW

SEQ ID NO: 100709 - protein, 10 aa, Homo sapiens
  Table A; Target 100709; HLA-C*16:04; ZFP42; ENSG00000179059; CTA
AEIEPVSAVW

SEQ ID NO: 100710 - protein, 8 aa, Homo sapiens
  Table A; Target 100710; HLA-A*23:01; ZFP42; ENSG00000179059; CTA
AFVESSKL

SEQ ID NO: 100711 - protein, 8 aa, Homo sapiens
  Table A; Target 100711; HLA-C*01:02; ZFP42; ENSG00000179059; CTA
AFVESSKL

SEQ ID NO: 100712 - protein, 8 aa, Homo sapiens
  Table A; Target 100712; HLA-C*04:01; ZFP42; ENSG00000179059; CTA
AFVESSKL

SEQ ID NO: 100713 - protein, 8 aa, Homo sapiens
  Table A; Target 100713; HLA-C*14:02; ZFP42; ENSG00000179059; CTA
AFVESSKL

SEQ ID NO: 100714 - protein, 8 aa, Homo sapiens
  Table A; Target 100714; HLA-C*16:01; ZFP42; ENSG00000179059; CTA
AFVESSKL

SEQ ID NO: 100715 - protein, 9 aa, Homo sapiens
  Table A; Target 100715; HLA-A*03:01; ZFP42; ENSG00000179059; CTA
ALCDGYVCY

SEQ ID NO: 100716 - protein, 9 aa, Homo sapiens
  Table A; Target 100716; HLA-A*03:02; ZFP42; ENSG00000179059; CTA
ALCDGYVCY

SEQ ID NO: 100717 - protein, 9 aa, Homo sapiens
  Table A; Target 100717; HLA-A*25:01; ZFP42; ENSG00000179059; CTA
ALCDGYVCY

SEQ ID NO: 100718 - protein, 9 aa, Homo sapiens
  Table A; Target 100718; HLA-A*26:01; ZFP42; ENSG00000179059; CTA
ALCDGYVCY

SEQ ID NO: 100719 - protein, 9 aa, Homo sapiens
  Table A; Target 100719; HLA-A*29:02; ZFP42; ENSG00000179059; CTA
ALCDGYVCY

SEQ ID NO: 100720 - protein, 9 aa, Homo sapiens
  Table A; Target 100720; HLA-A*30:02; ZFP42; ENSG00000179059; CTA
ALCDGYVCY

SEQ ID NO: 100721 - protein, 9 aa, Homo sapiens
  Table A; Target 100721; HLA-B*15:01; ZFP42; ENSG00000179059; CTA
ALCDGYVCY

SEQ ID NO: 100722 - protein, 9 aa, Homo sapiens
  Table A; Target 100722; HLA-C*07:04; ZFP42; ENSG00000179059; CTA
ALCDGYVCY

SEQ ID NO: 100723 - protein, 10 aa, Homo sapiens
  Table A; Target 100723; HLA-B*07:02; ZFP42; ENSG00000179059; CTA
APSGAKPRQG

SEQ ID NO: 100724 - protein, 11 aa, Homo sapiens
  Table A; Target 100724; HLA-B*07:02; ZFP42; ENSG00000179059; CTA
APSGAKPRQGK

SEQ ID NO: 100725 - protein, 10 aa, Homo sapiens
  Table A; Target 100725; HLA-A*01:01; ZFP42; ENSG00000179059; CTA
ASSLECSLEY

SEQ ID NO: 100726 - protein, 10 aa, Homo sapiens
  Table A; Target 100726; HLA-A*30:02; ZFP42; ENSG00000179059; CTA
ASSLECSLEY

SEQ ID NO: 100727 - protein, 10 aa, Homo sapiens
  Table A; Target 100727; HLA-C*07:01; ZFP42; ENSG00000179059; CTA
ASSLECSLEY

SEQ ID NO: 100728 - protein, 9 aa, Homo sapiens
  Table A; Target 100728; HLA-A*29:02; ZFP42; ENSG00000179059; CTA
AVWALCDGY

SEQ ID NO: 100729 - protein, 9 aa, Homo sapiens
  Table A; Target 100729; HLA-A*30:02; ZFP42; ENSG00000179059; CTA
AVWALCDGY

SEQ ID NO: 100730 - protein, 9 aa, Homo sapiens
  Table A; Target 100730; HLA-A*23:01; ZFP42; ENSG00000179059; CTA
CYEPGPQAL

SEQ ID NO: 100731 - protein, 9 aa, Homo sapiens
  Table A; Target 100731; HLA-A*24:02; ZFP42; ENSG00000179059; CTA
CYEPGPQAL

SEQ ID NO: 100732 - protein, 9 aa, Homo sapiens
  Table A; Target 100732; HLA-A*32:01; ZFP42; ENSG00000179059; CTA
CYEPGPQAL

SEQ ID NO: 100733 - protein, 9 aa, Homo sapiens
  Table A; Target 100733; HLA-B*27:05; ZFP42; ENSG00000179059; CTA
CYEPGPQAL

SEQ ID NO: 100734 - protein, 9 aa, Homo sapiens
  Table A; Target 100734; HLA-B*35:03; ZFP42; ENSG00000179059; CTA
CYEPGPQAL

SEQ ID NO: 100735 - protein, 9 aa, Homo sapiens
  Table A; Target 100735; HLA-B*38:01; ZFP42; ENSG00000179059; CTA
CYEPGPQAL

SEQ ID NO: 100736 - protein, 9 aa, Homo sapiens
  Table A; Target 100736; HLA-C*01:02; ZFP42; ENSG00000179059; CTA
CYEPGPQAL

SEQ ID NO: 100737 - protein, 9 aa, Homo sapiens
  Table A; Target 100737; HLA-C*04:01; ZFP42; ENSG00000179059; CTA
CYEPGPQAL

SEQ ID NO: 100738 - protein, 9 aa, Homo sapiens
  Table A; Target 100738; HLA-C*07:02; ZFP42; ENSG00000179059; CTA
CYEPGPQAL

SEQ ID NO: 100739 - protein, 9 aa, Homo sapiens
  Table A; Target 100739; HLA-C*14:02; ZFP42; ENSG00000179059; CTA
CYEPGPQAL

SEQ ID NO: 100740 - protein, 9 aa, Homo sapiens
  Table A; Target 100740; HLA-C*16:02; ZFP42; ENSG00000179059; CTA
CYEPGPQAL

SEQ ID NO: 100741 - protein, 8 aa, Homo sapiens
  Table A; Target 100741; HLA-B*51:01; ZFP42; ENSG00000179059; CTA
DCYIECVI

SEQ ID NO: 100742 - protein, 9 aa, Homo sapiens
  Table A; Target 100742; HLA-A*33:01; ZFP42; ENSG00000179059; CTA
DCYIECVIR

SEQ ID NO: 100743 - protein, 8 aa, Homo sapiens
  Table A; Target 100743; HLA-B*08:01; ZFP42; ENSG00000179059; CTA
DFNLRTHV

SEQ ID NO: 100744 - protein, 9 aa, Homo sapiens
  Table A; Target 100744; HLA-A*33:01; ZFP42; ENSG00000179059; CTA
DFNLRTHVR

SEQ ID NO: 100745 - protein, 9 aa, Homo sapiens
  Table A; Target 100745; HLA-A*33:03; ZFP42; ENSG00000179059; CTA
DFNLRTHVR

SEQ ID NO: 100746 - protein, 11 aa, Homo sapiens
  Table A; Target 100746; HLA-A*25:01; ZFP42; ENSG00000179059; CTA
DLSDPKQLAEF

SEQ ID NO: 100747 - protein, 11 aa, Homo sapiens
  Table A; Target 100747; HLA-A*26:01; ZFP42; ENSG00000179059; CTA
DLSDPKQLAEF

SEQ ID NO: 100748 - protein, 8 aa, Homo sapiens
  Table A; Target 100748; HLA-A*25:01; ZFP42; ENSG00000179059; CTA
DPKQLAEF

SEQ ID NO: 100749 - protein, 8 aa, Homo sapiens
  Table A; Target 100749; HLA-B*08:01; ZFP42; ENSG00000179059; CTA
DPKQLAEF

SEQ ID NO: 100750 - protein, 9 aa, Homo sapiens
  Table A; Target 100750; HLA-B*54:01; ZFP42; ENSG00000179059; CTA
DPKQLAEFA

SEQ ID NO: 100751 - protein, 10 aa, Homo sapiens
  Table A; Target 100751; HLA-A*33:01; ZFP42; ENSG00000179059; CTA
DPKQLAEFAR

SEQ ID NO: 100752 - protein, 10 aa, Homo sapiens
  Table A; Target 100752; HLA-A*33:03; ZFP42; ENSG00000179059; CTA
DPKQLAEFAR

SEQ ID NO: 100753 - protein, 10 aa, Homo sapiens
  Table A; Target 100753; HLA-A*68:01; ZFP42; ENSG00000179059; CTA
DPKQLAEFAR

SEQ ID NO: 100754 - protein, 9 aa, Homo sapiens
  Table A; Target 100754; HLA-A*01:01; ZFP42; ENSG00000179059; CTA
DSLFESLEY

SEQ ID NO: 100755 - protein, 9 aa, Homo sapiens
  Table A; Target 100755; HLA-A*26:01; ZFP42; ENSG00000179059; CTA
DSLFESLEY

SEQ ID NO: 100756 - protein, 9 aa, Homo sapiens
  Table A; Target 100756; HLA-A*29:02; ZFP42; ENSG00000179059; CTA
DSLFESLEY

SEQ ID NO: 100757 - protein, 9 aa, Homo sapiens
  Table A; Target 100757; HLA-B*18:01; ZFP42; ENSG00000179059; CTA
DSLFESLEY

SEQ ID NO: 100758 - protein, 9 aa, Homo sapiens
  Table A; Target 100758; HLA-B*35:01; ZFP42; ENSG00000179059; CTA
DSLFESLEY

SEQ ID NO: 100759 - protein, 9 aa, Homo sapiens
  Table A; Target 100759; HLA-C*03:03; ZFP42; ENSG00000179059; CTA
DSLFESLEY

SEQ ID NO: 100760 - protein, 9 aa, Homo sapiens
  Table A; Target 100760; HLA-C*07:01; ZFP42; ENSG00000179059; CTA
DSLFESLEY

SEQ ID NO: 100761 - protein, 9 aa, Homo sapiens
  Table A; Target 100761; HLA-C*07:06; ZFP42; ENSG00000179059; CTA
DSLFESLEY

SEQ ID NO: 100762 - protein, 11 aa, Homo sapiens
  Table A; Target 100762; HLA-A*11:01; ZFP42; ENSG00000179059; CTA
DSLFESLEYLK

SEQ ID NO: 100763 - protein, 11 aa, Homo sapiens
  Table A; Target 100763; HLA-B*27:02; ZFP42; ENSG00000179059; CTA
DSLFESLEYLK

SEQ ID NO: 100764 - protein, 9 aa, Homo sapiens
  Table A; Target 100764; HLA-A*68:01; ZFP42; ENSG00000179059; CTA
EASSLECSL

SEQ ID NO: 100765 - protein, 9 aa, Homo sapiens
  Table A; Target 100765; HLA-B*35:01; ZFP42; ENSG00000179059; CTA
EASSLECSL

SEQ ID NO: 100766 - protein, 9 aa, Homo sapiens
  Table A; Target 100766; HLA-B*35:03; ZFP42; ENSG00000179059; CTA
EASSLECSL

SEQ ID NO: 100767 - protein, 9 aa, Homo sapiens
  Table A; Target 100767; HLA-B*38:01; ZFP42; ENSG00000179059; CTA
EASSLECSL

SEQ ID NO: 100768 - protein, 9 aa, Homo sapiens
  Table A; Target 100768; HLA-B*39:01; ZFP42; ENSG00000179059; CTA
EASSLECSL

SEQ ID NO: 100769 - protein, 9 aa, Homo sapiens
  Table A; Target 100769; HLA-C*07:06; ZFP42; ENSG00000179059; CTA
EASSLECSL

SEQ ID NO: 100770 - protein, 11 aa, Homo sapiens
  Table A; Target 100770; HLA-A*26:01; ZFP42; ENSG00000179059; CTA
EASSLECSLEY

SEQ ID NO: 100771 - protein, 11 aa, Homo sapiens
  Table A; Target 100771; HLA-C*07:01; ZFP42; ENSG00000179059; CTA
EASSLECSLEY

SEQ ID NO: 100772 - protein, 8 aa, Homo sapiens
  Table A; Target 100772; HLA-B*37:01; ZFP42; ENSG00000179059; CTA
EDSLFESL

SEQ ID NO: 100773 - protein, 10 aa, Homo sapiens
  Table A; Target 100773; HLA-B*27:02; ZFP42; ENSG00000179059; CTA
EDSLFESLEY

SEQ ID NO: 100774 - protein, 9 aa, Homo sapiens
  Table A; Target 100774; HLA-A*30:01; ZFP42; ENSG00000179059; CTA
EEDSLFESL

SEQ ID NO: 100775 - protein, 9 aa, Homo sapiens
  Table A; Target 100775; HLA-B*18:01; ZFP42; ENSG00000179059; CTA
EEDSLFESL

SEQ ID NO: 100776 - protein, 9 aa, Homo sapiens
  Table A; Target 100776; HLA-B*38:01; ZFP42; ENSG00000179059; CTA
EEDSLFESL

SEQ ID NO: 100777 - protein, 9 aa, Homo sapiens
  Table A; Target 100777; HLA-B*39:01; ZFP42; ENSG00000179059; CTA
EEDSLFESL

SEQ ID NO: 100778 - protein, 9 aa, Homo sapiens
  Table A; Target 100778; HLA-B*40:01; ZFP42; ENSG00000179059; CTA
EEDSLFESL

SEQ ID NO: 100779 - protein, 9 aa, Homo sapiens
  Table A; Target 100779; HLA-B*44:02; ZFP42; ENSG00000179059; CTA
EEDSLFESL

SEQ ID NO: 100780 - protein, 9 aa, Homo sapiens
  Table A; Target 100780; HLA-B*44:03; ZFP42; ENSG00000179059; CTA
EEDSLFESL

SEQ ID NO: 100781 - protein, 9 aa, Homo sapiens
  Table A; Target 100781; HLA-B*49:01; ZFP42; ENSG00000179059; CTA
EEDSLFESL

SEQ ID NO: 100782 - protein, 11 aa, Homo sapiens
  Table A; Target 100782; HLA-B*18:01; ZFP42; ENSG00000179059; CTA
EEDSLFESLEY

SEQ ID NO: 100783 - protein, 11 aa, Homo sapiens
  Table A; Target 100783; HLA-B*44:02; ZFP42; ENSG00000179059; CTA
EEDSLFESLEY

SEQ ID NO: 100784 - protein, 11 aa, Homo sapiens
  Table A; Target 100784; HLA-B*44:03; ZFP42; ENSG00000179059; CTA
EEDSLFESLEY

SEQ ID NO: 100785 - protein, 9 aa, Homo sapiens
  Table A; Target 100785; HLA-B*08:01; ZFP42; ENSG00000179059; CTA
EGCGKRFSL

SEQ ID NO: 100786 - protein, 8 aa, Homo sapiens
  Table A; Target 100786; HLA-C*05:01; ZFP42; ENSG00000179059; CTA
EIEPVSAV

SEQ ID NO: 100787 - protein, 9 aa, Homo sapiens
  Table A; Target 100787; HLA-A*25:01; ZFP42; ENSG00000179059; CTA
EIEPVSAVW

SEQ ID NO: 100788 - protein, 9 aa, Homo sapiens
  Table A; Target 100788; HLA-A*26:01; ZFP42; ENSG00000179059; CTA
EIEPVSAVW

SEQ ID NO: 100789 - protein, 9 aa, Homo sapiens
  Table A; Target 100789; HLA-A*32:01; ZFP42; ENSG00000179059; CTA
EIEPVSAVW

SEQ ID NO: 100790 - protein, 9 aa, Homo sapiens
  Table A; Target 100790; HLA-A*33:03; ZFP42; ENSG00000179059; CTA
EIEPVSAVW

SEQ ID NO: 100791 - protein, 9 aa, Homo sapiens
  Table A; Target 100791; HLA-B*18:01; ZFP42; ENSG00000179059; CTA
EIEPVSAVW

SEQ ID NO: 100792 - protein, 9 aa, Homo sapiens
  Table A; Target 100792; HLA-B*38:01; ZFP42; ENSG00000179059; CTA
EIEPVSAVW

SEQ ID NO: 100793 - protein, 9 aa, Homo sapiens
  Table A; Target 100793; HLA-B*39:01; ZFP42; ENSG00000179059; CTA
EIEPVSAVW

SEQ ID NO: 100794 - protein, 9 aa, Homo sapiens
  Table A; Target 100794; HLA-B*44:02; ZFP42; ENSG00000179059; CTA
EIEPVSAVW

SEQ ID NO: 100795 - protein, 9 aa, Homo sapiens
  Table A; Target 100795; HLA-B*44:03; ZFP42; ENSG00000179059; CTA
EIEPVSAVW

SEQ ID NO: 100796 - protein, 9 aa, Homo sapiens
  Table A; Target 100796; HLA-B*57:01; ZFP42; ENSG00000179059; CTA
EIEPVSAVW

SEQ ID NO: 100797 - protein, 9 aa, Homo sapiens
  Table A; Target 100797; HLA-B*58:01; ZFP42; ENSG00000179059; CTA
EIEPVSAVW

SEQ ID NO: 100798 - protein, 9 aa, Homo sapiens
  Table A; Target 100798; HLA-C*07:04; ZFP42; ENSG00000179059; CTA
EIEPVSAVW

SEQ ID NO: 100799 - protein, 9 aa, Homo sapiens
  Table A; Target 100799; HLA-C*07:06; ZFP42; ENSG00000179059; CTA
EIEPVSAVW

SEQ ID NO: 100800 - protein, 9 aa, Homo sapiens
  Table A; Target 100800; HLA-C*16:04; ZFP42; ENSG00000179059; CTA
EIEPVSAVW

SEQ ID NO: 100801 - protein, 11 aa, Homo sapiens
  Table A; Target 100801; HLA-A*68:02; ZFP42; ENSG00000179059; CTA
EIEPVSAVWAL

SEQ ID NO: 100802 - protein, 9 aa, Homo sapiens
  Table A; Target 100802; HLA-A*01:01; ZFP42; ENSG00000179059; CTA
ENSLEYSEY

SEQ ID NO: 100803 - protein, 9 aa, Homo sapiens
  Table A; Target 100803; HLA-A*25:01; ZFP42; ENSG00000179059; CTA
ENSLEYSEY

SEQ ID NO: 100804 - protein, 9 aa, Homo sapiens
  Table A; Target 100804; HLA-A*26:01; ZFP42; ENSG00000179059; CTA
ENSLEYSEY

SEQ ID NO: 100805 - protein, 9 aa, Homo sapiens
  Table A; Target 100805; HLA-A*26:01; ZFP42; ENSG00000179059; CTA
EPVSAVWAL

SEQ ID NO: 100806 - protein, 9 aa, Homo sapiens
  Table A; Target 100806; HLA-A*33:03; ZFP42; ENSG00000179059; CTA
EPVSAVWAL

SEQ ID NO: 100807 - protein, 9 aa, Homo sapiens
  Table A; Target 100807; HLA-A*68:01; ZFP42; ENSG00000179059; CTA
EPVSAVWAL

SEQ ID NO: 100808 - protein, 9 aa, Homo sapiens
  Table A; Target 100808; HLA-A*68:02; ZFP42; ENSG00000179059; CTA
EPVSAVWAL

SEQ ID NO: 100809 - protein, 9 aa, Homo sapiens
  Table A; Target 100809; HLA-B*07:02; ZFP42; ENSG00000179059; CTA
EPVSAVWAL

SEQ ID NO: 100810 - protein, 9 aa, Homo sapiens
  Table A; Target 100810; HLA-B*35:01; ZFP42; ENSG00000179059; CTA
EPVSAVWAL

SEQ ID NO: 100811 - protein, 9 aa, Homo sapiens
  Table A; Target 100811; HLA-B*54:01; ZFP42; ENSG00000179059; CTA
EPVSAVWAL

SEQ ID NO: 100812 - protein, 9 aa, Homo sapiens
  Table A; Target 100812; HLA-B*55:01; ZFP42; ENSG00000179059; CTA
EPVSAVWAL

SEQ ID NO: 100813 - protein, 9 aa, Homo sapiens
  Table A; Target 100813; HLA-B*56:01; ZFP42; ENSG00000179059; CTA
EPVSAVWAL

SEQ ID NO: 100814 - protein, 9 aa, Homo sapiens
  Table A; Target 100814; HLA-C*07:02; ZFP42; ENSG00000179059; CTA
EPVSAVWAL

SEQ ID NO: 100815 - protein, 9 aa, Homo sapiens
  Table A; Target 100815; HLA-C*07:06; ZFP42; ENSG00000179059; CTA
EPVSAVWAL

SEQ ID NO: 100816 - protein, 8 aa, Homo sapiens
  Table A; Target 100816; HLA-B*13:02; ZFP42; ENSG00000179059; CTA
EQQLSQKV

SEQ ID NO: 100817 - protein, 9 aa, Homo sapiens
  Table A; Target 100817; HLA-B*15:01; ZFP42; ENSG00000179059; CTA
EQQLSQKVF

SEQ ID NO: 100818 - protein, 9 aa, Homo sapiens
  Table A; Target 100818; HLA-B*15:03; ZFP42; ENSG00000179059; CTA
EQQLSQKVF

SEQ ID NO: 100819 - protein, 9 aa, Homo sapiens
  Table A; Target 100819; HLA-B*27:02; ZFP42; ENSG00000179059; CTA
EQQLSQKVF

SEQ ID NO: 100820 - protein, 9 aa, Homo sapiens
  Table A; Target 100820; HLA-B*44:02; ZFP42; ENSG00000179059; CTA
EQQLSQKVF

SEQ ID NO: 100821 - protein, 9 aa, Homo sapiens
  Table A; Target 100821; HLA-B*44:03; ZFP42; ENSG00000179059; CTA
EQQLSQKVF

SEQ ID NO: 100822 - protein, 9 aa, Homo sapiens
  Table A; Target 100822; HLA-C*07:04; ZFP42; ENSG00000179059; CTA
EQQLSQKVF

SEQ ID NO: 100823 - protein, 9 aa, Homo sapiens
  Table A; Target 100823; HLA-C*16:04; ZFP42; ENSG00000179059; CTA
EQQLSQKVF

SEQ ID NO: 100824 - protein, 8 aa, Homo sapiens
  Table A; Target 100824; HLA-C*04:01; ZFP42; ENSG00000179059; CTA
EYDSLSAI

SEQ ID NO: 100825 - protein, 8 aa, Homo sapiens
  Table A; Target 100825; HLA-C*05:01; ZFP42; ENSG00000179059; CTA
EYDSLSAI

SEQ ID NO: 100826 - protein, 11 aa, Homo sapiens
  Table A; Target 100826; HLA-A*23:01; ZFP42; ENSG00000179059; CTA
EYLKKGSEQQL

SEQ ID NO: 100827 - protein, 11 aa, Homo sapiens
  Table A; Target 100827; HLA-A*24:02; ZFP42; ENSG00000179059; CTA
EYLKKGSEQQL

SEQ ID NO: 100828 - protein, 11 aa, Homo sapiens
  Table A; Target 100828; HLA-A*33:01; ZFP42; ENSG00000179059; CTA
EYLKKGSEQQL

SEQ ID NO: 100829 - protein, 11 aa, Homo sapiens
  Table A; Target 100829; HLA-A*33:03; ZFP42; ENSG00000179059; CTA
EYLKKGSEQQL

SEQ ID NO: 100830 - protein, 8 aa, Homo sapiens
  Table A; Target 100830; HLA-C*04:01; ZFP42; ENSG00000179059; CTA
EYMKKGVK

SEQ ID NO: 100831 - protein, 9 aa, Homo sapiens
  Table A; Target 100831; HLA-A*33:01; ZFP42; ENSG00000179059; CTA
EYMKKGVKK

SEQ ID NO: 100832 - protein, 9 aa, Homo sapiens
  Table A; Target 100832; HLA-A*33:03; ZFP42; ENSG00000179059; CTA
EYMKKGVKK

SEQ ID NO: 100833 - protein, 8 aa, Homo sapiens
  Table A; Target 100833; HLA-A*23:01; ZFP42; ENSG00000179059; CTA
EYMTGKKL

SEQ ID NO: 100834 - protein, 8 aa, Homo sapiens
  Table A; Target 100834; HLA-A*24:02; ZFP42; ENSG00000179059; CTA
EYMTGKKL

SEQ ID NO: 100835 - protein, 8 aa, Homo sapiens
  Table A; Target 100835; HLA-B*08:01; ZFP42; ENSG00000179059; CTA
EYMTGKKL

SEQ ID NO: 100836 - protein, 8 aa, Homo sapiens
  Table A; Target 100836; HLA-C*07:01; ZFP42; ENSG00000179059; CTA
EYMTGKKL

SEQ ID NO: 100837 - protein, 8 aa, Homo sapiens
  Table A; Target 100837; HLA-C*14:02; ZFP42; ENSG00000179059; CTA
EYMTGKKL

SEQ ID NO: 100838 - protein, 9 aa, Homo sapiens
  Table A; Target 100838; HLA-A*03:02; ZFP42; ENSG00000179059; CTA
EYSEYMTGK

SEQ ID NO: 100839 - protein, 9 aa, Homo sapiens
  Table A; Target 100839; HLA-A*11:01; ZFP42; ENSG00000179059; CTA
EYSEYMTGK

SEQ ID NO: 100840 - protein, 9 aa, Homo sapiens
  Table A; Target 100840; HLA-A*26:01; ZFP42; ENSG00000179059; CTA
EYSEYMTGK

SEQ ID NO: 100841 - protein, 9 aa, Homo sapiens
  Table A; Target 100841; HLA-A*31:01; ZFP42; ENSG00000179059; CTA
EYSEYMTGK

SEQ ID NO: 100842 - protein, 9 aa, Homo sapiens
  Table A; Target 100842; HLA-A*33:01; ZFP42; ENSG00000179059; CTA
EYSEYMTGK

SEQ ID NO: 100843 - protein, 9 aa, Homo sapiens
  Table A; Target 100843; HLA-A*68:01; ZFP42; ENSG00000179059; CTA
EYSEYMTGK

SEQ ID NO: 100844 - protein, 9 aa, Homo sapiens
  Table A; Target 100844; HLA-B*27:02; ZFP42; ENSG00000179059; CTA
EYSEYMTGK

SEQ ID NO: 100845 - protein, 9 aa, Homo sapiens
  Table A; Target 100845; HLA-B*27:05; ZFP42; ENSG00000179059; CTA
EYSEYMTGK

SEQ ID NO: 100846 - protein, 9 aa, Homo sapiens
  Table A; Target 100846; HLA-C*07:01; ZFP42; ENSG00000179059; CTA
EYSEYMTGK

SEQ ID NO: 100847 - protein, 9 aa, Homo sapiens
  Table A; Target 100847; HLA-C*07:06; ZFP42; ENSG00000179059; CTA
EYSEYMTGK

SEQ ID NO: 100848 - protein, 10 aa, Homo sapiens
  Table A; Target 100848; HLA-C*07:02; ZFP42; ENSG00000179059; CTA
EYSEYMTGKK

SEQ ID NO: 100849 - protein, 11 aa, Homo sapiens
  Table A; Target 100849; HLA-A*24:02; ZFP42; ENSG00000179059; CTA
EYSEYMTGKKL

SEQ ID NO: 100850 - protein, 8 aa, Homo sapiens
  Table A; Target 100850; HLA-A*30:01; ZFP42; ENSG00000179059; CTA
FEASSLEC

SEQ ID NO: 100851 - protein, 8 aa, Homo sapiens
  Table A; Target 100851; HLA-B*49:01; ZFP42; ENSG00000179059; CTA
FEASSLEC

SEQ ID NO: 100852 - protein, 10 aa, Homo sapiens
  Table A; Target 100852; HLA-A*30:01; ZFP42; ENSG00000179059; CTA
FEASSLECSL

SEQ ID NO: 100853 - protein, 10 aa, Homo sapiens
  Table A; Target 100853; HLA-B*18:01; ZFP42; ENSG00000179059; CTA
FEASSLECSL

SEQ ID NO: 100854 - protein, 10 aa, Homo sapiens
  Table A; Target 100854; HLA-B*40:01; ZFP42; ENSG00000179059; CTA
FEASSLECSL

SEQ ID NO: 100855 - protein, 10 aa, Homo sapiens
  Table A; Target 100855; HLA-B*40:02; ZFP42; ENSG00000179059; CTA
FEASSLECSL

SEQ ID NO: 100856 - protein, 10 aa, Homo sapiens
  Table A; Target 100856; HLA-B*49:01; ZFP42; ENSG00000179059; CTA
FEASSLECSL

SEQ ID NO: 100857 - protein, 8 aa, Homo sapiens
  Table A; Target 100857; HLA-B*27:02; ZFP42; ENSG00000179059; CTA
FESLEYLK

SEQ ID NO: 100858 - protein, 8 aa, Homo sapiens
  Table A; Target 100858; HLA-A*03:02; ZFP42; ENSG00000179059; CTA
FIQSNNLK

SEQ ID NO: 100859 - protein, 9 aa, Homo sapiens
  Table A; Target 100859; HLA-A*01:01; ZFP42; ENSG00000179059; CTA
FSDCYIECV

SEQ ID NO: 100860 - protein, 10 aa, Homo sapiens
  Table A; Target 100860; HLA-A*31:01; ZFP42; ENSG00000179059; CTA
FVCPFQGCNR

SEQ ID NO: 100861 - protein, 9 aa, Homo sapiens
  Table A; Target 100861; HLA-A*33:01; ZFP42; ENSG00000179059; CTA
FVESSKLKR

SEQ ID NO: 100862 - protein, 9 aa, Homo sapiens
  Table A; Target 100862; HLA-A*33:03; ZFP42; ENSG00000179059; CTA
FVESSKLKR

SEQ ID NO: 100863 - protein, 9 aa, Homo sapiens
  Table A; Target 100863; HLA-A*68:01; ZFP42; ENSG00000179059; CTA
FVESSKLKR

SEQ ID NO: 100864 - protein, 8 aa, Homo sapiens
  Table A; Target 100864; HLA-A*30:01; ZFP42; ENSG00000179059; CTA
GEFSQPIL

SEQ ID NO: 100865 - protein, 8 aa, Homo sapiens
  Table A; Target 100865; HLA-B*18:01; ZFP42; ENSG00000179059; CTA
GEFSQPIL

SEQ ID NO: 100866 - protein, 8 aa, Homo sapiens
  Table A; Target 100866; HLA-B*27:05; ZFP42; ENSG00000179059; CTA
GEFSQPIL

SEQ ID NO: 100867 - protein, 8 aa, Homo sapiens
  Table A; Target 100867; HLA-B*37:01; ZFP42; ENSG00000179059; CTA
GEFSQPIL

SEQ ID NO: 100868 - protein, 8 aa, Homo sapiens
  Table A; Target 100868; HLA-B*40:01; ZFP42; ENSG00000179059; CTA
GEFSQPIL

SEQ ID NO: 100869 - protein, 8 aa, Homo sapiens
  Table A; Target 100869; HLA-B*40:02; ZFP42; ENSG00000179059; CTA
GEFSQPIL

SEQ ID NO: 100870 - protein, 8 aa, Homo sapiens
  Table A; Target 100870; HLA-B*44:03; ZFP42; ENSG00000179059; CTA
GEFSQPIL

SEQ ID NO: 100871 - protein, 8 aa, Homo sapiens
  Table A; Target 100871; HLA-B*49:01; ZFP42; ENSG00000179059; CTA
GEFSQPIL

SEQ ID NO: 100872 - protein, 8 aa, Homo sapiens
  Table A; Target 100872; HLA-C*16:04; ZFP42; ENSG00000179059; CTA
GEFSQPIL

SEQ ID NO: 100873 - protein, 9 aa, Homo sapiens
  Table A; Target 100873; HLA-B*37:01; ZFP42; ENSG00000179059; CTA
GEKPFRCTF

SEQ ID NO: 100874 - protein, 9 aa, Homo sapiens
  Table A; Target 100874; HLA-B*40:02; ZFP42; ENSG00000179059; CTA
GEKPFRCTF

SEQ ID NO: 100875 - protein, 9 aa, Homo sapiens
  Table A; Target 100875; HLA-B*44:02; ZFP42; ENSG00000179059; CTA
GEKPFRCTF

SEQ ID NO: 100876 - protein, 9 aa, Homo sapiens
  Table A; Target 100876; HLA-B*44:03; ZFP42; ENSG00000179059; CTA
GEKPFRCTF

SEQ ID NO: 100877 - protein, 10 aa, Homo sapiens
  Table A; Target 100877; HLA-A*26:01; ZFP42; ENSG00000179059; CTA
GENSLEYSEY

SEQ ID NO: 100878 - protein, 10 aa, Homo sapiens
  Table A; Target 100878; HLA-A*29:02; ZFP42; ENSG00000179059; CTA
GENSLEYSEY

SEQ ID NO: 100879 - protein, 10 aa, Homo sapiens
  Table A; Target 100879; HLA-A*30:02; ZFP42; ENSG00000179059; CTA
GENSLEYSEY

SEQ ID NO: 100880 - protein, 10 aa, Homo sapiens
  Table A; Target 100880; HLA-B*15:01; ZFP42; ENSG00000179059; CTA
GENSLEYSEY

SEQ ID NO: 100881 - protein, 10 aa, Homo sapiens
  Table A; Target 100881; HLA-B*15:03; ZFP42; ENSG00000179059; CTA
GENSLEYSEY

SEQ ID NO: 100882 - protein, 10 aa, Homo sapiens
  Table A; Target 100882; HLA-B*18:01; ZFP42; ENSG00000179059; CTA
GENSLEYSEY

SEQ ID NO: 100883 - protein, 10 aa, Homo sapiens
  Table A; Target 100883; HLA-B*27:02; ZFP42; ENSG00000179059; CTA
GENSLEYSEY

SEQ ID NO: 100884 - protein, 10 aa, Homo sapiens
  Table A; Target 100884; HLA-B*27:05; ZFP42; ENSG00000179059; CTA
GENSLEYSEY

SEQ ID NO: 100885 - protein, 10 aa, Homo sapiens
  Table A; Target 100885; HLA-B*39:01; ZFP42; ENSG00000179059; CTA
GENSLEYSEY

SEQ ID NO: 100886 - protein, 10 aa, Homo sapiens
  Table A; Target 100886; HLA-B*40:01; ZFP42; ENSG00000179059; CTA
GENSLEYSEY

SEQ ID NO: 100887 - protein, 10 aa, Homo sapiens
  Table A; Target 100887; HLA-B*44:02; ZFP42; ENSG00000179059; CTA
GENSLEYSEY

SEQ ID NO: 100888 - protein, 10 aa, Homo sapiens
  Table A; Target 100888; HLA-B*44:03; ZFP42; ENSG00000179059; CTA
GENSLEYSEY

SEQ ID NO: 100889 - protein, 10 aa, Homo sapiens
  Table A; Target 100889; HLA-B*49:01; ZFP42; ENSG00000179059; CTA
GENSLEYSEY

SEQ ID NO: 100890 - protein, 10 aa, Homo sapiens
  Table A; Target 100890; HLA-C*07:01; ZFP42; ENSG00000179059; CTA
GENSLEYSEY

SEQ ID NO: 100891 - protein, 10 aa, Homo sapiens
  Table A; Target 100891; HLA-C*16:04; ZFP42; ENSG00000179059; CTA
GENSLEYSEY

SEQ ID NO: 100892 - protein, 9 aa, Homo sapiens
  Table A; Target 100892; HLA-A*01:01; ZFP42; ENSG00000179059; CTA
GGDDFSDCY

SEQ ID NO: 100893 - protein, 10 aa, Homo sapiens
  Table A; Target 100893; HLA-C*06:02; ZFP42; ENSG00000179059; CTA
GGRAPSGAKP

SEQ ID NO: 100894 - protein, 11 aa, Homo sapiens
  Table A; Target 100894; HLA-A*31:01; ZFP42; ENSG00000179059; CTA
GGRAPSGAKPR

SEQ ID NO: 100895 - protein, 11 aa, Homo sapiens
  Table A; Target 100895; HLA-A*33:01; ZFP42; ENSG00000179059; CTA
GGRAPSGAKPR

SEQ ID NO: 100896 - protein, 10 aa, Homo sapiens
  Table A; Target 100896; HLA-B*15:03; ZFP42; ENSG00000179059; CTA
GKAFVESSKL

SEQ ID NO: 100897 - protein, 10 aa, Homo sapiens
  Table A; Target 100897; HLA-A*02:03; ZFP42; ENSG00000179059; CTA
GLGGRAPSGA

SEQ ID NO: 100898 - protein, 10 aa, Homo sapiens
  Table A; Target 100898; HLA-B*39:01; ZFP42; ENSG00000179059; CTA
GPQALGGDDF

SEQ ID NO: 100899 - protein, 9 aa, Homo sapiens
  Table A; Target 100899; HLA-B*27:05; ZFP42; ENSG00000179059; CTA
GRAPSGAKP

SEQ ID NO: 100900 - protein, 9 aa, Homo sapiens
  Table A; Target 100900; HLA-C*06:02; ZFP42; ENSG00000179059; CTA
GRAPSGAKP

SEQ ID NO: 100901 - protein, 10 aa, Homo sapiens
  Table A; Target 100901; HLA-B*27:05; ZFP42; ENSG00000179059; CTA
GRAPSGAKPR

SEQ ID NO: 100902 - protein, 10 aa, Homo sapiens
  Table A; Target 100902; HLA-C*06:02; ZFP42; ENSG00000179059; CTA
GRAPSGAKPR

SEQ ID NO: 100903 - protein, 10 aa, Homo sapiens
  Table A; Target 100903; HLA-C*07:02; ZFP42; ENSG00000179059; CTA
GRAPSGAKPR

SEQ ID NO: 100904 - protein, 9 aa, Homo sapiens
  Table A; Target 100904; HLA-A*03:02; ZFP42; ENSG00000179059; CTA
GSEQQLSQK

SEQ ID NO: 100905 - protein, 9 aa, Homo sapiens
  Table A; Target 100905; HLA-A*11:01; ZFP42; ENSG00000179059; CTA
GSEQQLSQK

SEQ ID NO: 100906 - protein, 11 aa, Homo sapiens
  Table A; Target 100906; HLA-B*58:01; ZFP42; ENSG00000179059; CTA
GSEQQLSQKVF

SEQ ID NO: 100907 - protein, 11 aa, Homo sapiens
  Table A; Target 100907; HLA-C*07:01; ZFP42; ENSG00000179059; CTA
GSEQQLSQKVF

SEQ ID NO: 100908 - protein, 9 aa, Homo sapiens
  Table A; Target 100908; HLA-A*03:01; ZFP42; ENSG00000179059; CTA
GVKKELPQK

SEQ ID NO: 100909 - protein, 9 aa, Homo sapiens
  Table A; Target 100909; HLA-A*03:02; ZFP42; ENSG00000179059; CTA
GVKKELPQK

SEQ ID NO: 100910 - protein, 9 aa, Homo sapiens
  Table A; Target 100910; HLA-A*11:01; ZFP42; ENSG00000179059; CTA
GVKKELPQK

SEQ ID NO: 100911 - protein, 10 aa, Homo sapiens
  Table A; Target 100911; HLA-A*03:01; ZFP42; ENSG00000179059; CTA
HILTHANTNK

SEQ ID NO: 100912 - protein, 10 aa, Homo sapiens
  Table A; Target 100912; HLA-A*03:02; ZFP42; ENSG00000179059; CTA
HILTHANTNK

SEQ ID NO: 100913 - protein, 10 aa, Homo sapiens
  Table A; Target 100913; HLA-A*11:01; ZFP42; ENSG00000179059; CTA
HILTHANTNK

SEQ ID NO: 100914 - protein, 9 aa, Homo sapiens
  Table A; Target 100914; HLA-C*04:01; ZFP42; ENSG00000179059; CTA
IACPQSGCT

SEQ ID NO: 100915 - protein, 9 aa, Homo sapiens
  Table A; Target 100915; HLA-C*07:01; ZFP42; ENSG00000179059; CTA
IACPQSGCT

SEQ ID NO: 100916 - protein, 10 aa, Homo sapiens
  Table A; Target 100916; HLA-A*31:01; ZFP42; ENSG00000179059; CTA
IACPQSGCTR

SEQ ID NO: 100917 - protein, 10 aa, Homo sapiens
  Table A; Target 100917; HLA-A*33:01; ZFP42; ENSG00000179059; CTA
IACPQSGCTR

SEQ ID NO: 100918 - protein, 10 aa, Homo sapiens
  Table A; Target 100918; HLA-A*33:03; ZFP42; ENSG00000179059; CTA
IACPQSGCTR

SEQ ID NO: 100919 - protein, 10 aa, Homo sapiens
  Table A; Target 100919; HLA-A*68:01; ZFP42; ENSG00000179059; CTA
IACPQSGCTR

SEQ ID NO: 100920 - protein, 10 aa, Homo sapiens
  Table A; Target 100920; HLA-B*27:05; ZFP42; ENSG00000179059; CTA
IACPQSGCTR

SEQ ID NO: 100921 - protein, 10 aa, Homo sapiens
  Table A; Target 100921; HLA-C*04:01; ZFP42; ENSG00000179059; CTA
IACPQSGCTR

SEQ ID NO: 100922 - protein, 10 aa, Homo sapiens
  Table A; Target 100922; HLA-C*07:01; ZFP42; ENSG00000179059; CTA
IACPQSGCTR

SEQ ID NO: 100923 - protein, 10 aa, Homo sapiens
  Table A; Target 100923; HLA-C*07:06; ZFP42; ENSG00000179059; CTA
IACPQSGCTR

SEQ ID NO: 100924 - protein, 9 aa, Homo sapiens
  Table A; Target 100924; HLA-A*30:01; ZFP42; ENSG00000179059; CTA
IDLSDPKQL

SEQ ID NO: 100925 - protein, 9 aa, Homo sapiens
  Table A; Target 100925; HLA-B*07:02; ZFP42; ENSG00000179059; CTA
IDLSDPKQL

SEQ ID NO: 100926 - protein, 9 aa, Homo sapiens
  Table A; Target 100926; HLA-B*37:01; ZFP42; ENSG00000179059; CTA
IDLSDPKQL

SEQ ID NO: 100927 - protein, 9 aa, Homo sapiens
  Table A; Target 100927; HLA-B*40:01; ZFP42; ENSG00000179059; CTA
IDLSDPKQL

SEQ ID NO: 100928 - protein, 9 aa, Homo sapiens
  Table A; Target 100928; HLA-B*40:02; ZFP42; ENSG00000179059; CTA
IDLSDPKQL

SEQ ID NO: 100929 - protein, 9 aa, Homo sapiens
  Table A; Target 100929; HLA-B*44:03; ZFP42; ENSG00000179059; CTA
IDLSDPKQL

SEQ ID NO: 100930 - protein, 9 aa, Homo sapiens
  Table A; Target 100930; HLA-C*06:02; ZFP42; ENSG00000179059; CTA
IDLSDPKQL

SEQ ID NO: 100931 - protein, 9 aa, Homo sapiens
  Table A; Target 100931; HLA-C*07:01; ZFP42; ENSG00000179059; CTA
IDLSDPKQL

SEQ ID NO: 100932 - protein, 9 aa, Homo sapiens
  Table A; Target 100932; HLA-C*07:04; ZFP42; ENSG00000179059; CTA
IDLSDPKQL

SEQ ID NO: 100933 - protein, 9 aa, Homo sapiens
  Table A; Target 100933; HLA-C*16:02; ZFP42; ENSG00000179059; CTA
IDLSDPKQL

SEQ ID NO: 100934 - protein, 9 aa, Homo sapiens
  Table A; Target 100934; HLA-B*18:01; ZFP42; ENSG00000179059; CTA
IECVIRGEF

SEQ ID NO: 100935 - protein, 9 aa, Homo sapiens
  Table A; Target 100935; HLA-B*37:01; ZFP42; ENSG00000179059; CTA
IECVIRGEF

SEQ ID NO: 100936 - protein, 9 aa, Homo sapiens
  Table A; Target 100936; HLA-B*44:02; ZFP42; ENSG00000179059; CTA
IECVIRGEF

SEQ ID NO: 100937 - protein, 9 aa, Homo sapiens
  Table A; Target 100937; HLA-B*44:03; ZFP42; ENSG00000179059; CTA
IECVIRGEF

SEQ ID NO: 100938 - protein, 8 aa, Homo sapiens
  Table A; Target 100938; HLA-B*18:01; ZFP42; ENSG00000179059; CTA
IEPVSAVW

SEQ ID NO: 100939 - protein, 8 aa, Homo sapiens
  Table A; Target 100939; HLA-B*37:01; ZFP42; ENSG00000179059; CTA
IEPVSAVW

SEQ ID NO: 100940 - protein, 8 aa, Homo sapiens
  Table A; Target 100940; HLA-B*44:02; ZFP42; ENSG00000179059; CTA
IEPVSAVW

SEQ ID NO: 100941 - protein, 8 aa, Homo sapiens
  Table A; Target 100941; HLA-B*44:03; ZFP42; ENSG00000179059; CTA
IEPVSAVW

SEQ ID NO: 100942 - protein, 8 aa, Homo sapiens
  Table A; Target 100942; HLA-B*49:01; ZFP42; ENSG00000179059; CTA
IEPVSAVW

SEQ ID NO: 100943 - protein, 8 aa, Homo sapiens
  Table A; Target 100943; HLA-C*16:04; ZFP42; ENSG00000179059; CTA
IEPVSAVW

SEQ ID NO: 100944 - protein, 10 aa, Homo sapiens
  Table A; Target 100944; HLA-B*40:01; ZFP42; ENSG00000179059; CTA
IEPVSAVWAL

SEQ ID NO: 100945 - protein, 8 aa, Homo sapiens
  Table A; Target 100945; HLA-C*05:01; ZFP42; ENSG00000179059; CTA
ILEEDSLF

SEQ ID NO: 100946 - protein, 11 aa, Homo sapiens
  Table A; Target 100946; HLA-A*02:07; ZFP42; ENSG00000179059; CTA
ILEEDSLFESL

SEQ ID NO: 100947 - protein, 9 aa, Homo sapiens
  Table A; Target 100947; HLA-A*03:01; ZFP42; ENSG00000179059; CTA
ILTHANTNK

SEQ ID NO: 100948 - protein, 9 aa, Homo sapiens
  Table A; Target 100948; HLA-A*03:02; ZFP42; ENSG00000179059; CTA
ILTHANTNK

SEQ ID NO: 100949 - protein, 10 aa, Homo sapiens
  Table A; Target 100949; HLA-B*27:02; ZFP42; ENSG00000179059; CTA
IPGIDLSDPK

SEQ ID NO: 100950 - protein, 9 aa, Homo sapiens
  Table A; Target 100950; HLA-A*01:01; ZFP42; ENSG00000179059; CTA
IVGENSLEY

SEQ ID NO: 100951 - protein, 9 aa, Homo sapiens
  Table A; Target 100951; HLA-A*03:01; ZFP42; ENSG00000179059; CTA
IVGENSLEY

SEQ ID NO: 100952 - protein, 9 aa, Homo sapiens
  Table A; Target 100952; HLA-A*03:02; ZFP42; ENSG00000179059; CTA
IVGENSLEY

SEQ ID NO: 100953 - protein, 9 aa, Homo sapiens
  Table A; Target 100953; HLA-A*25:01; ZFP42; ENSG00000179059; CTA
IVGENSLEY

SEQ ID NO: 100954 - protein, 9 aa, Homo sapiens
  Table A; Target 100954; HLA-A*26:01; ZFP42; ENSG00000179059; CTA
IVGENSLEY

SEQ ID NO: 100955 - protein, 9 aa, Homo sapiens
  Table A; Target 100955; HLA-A*30:02; ZFP42; ENSG00000179059; CTA
IVGENSLEY

SEQ ID NO: 100956 - protein, 9 aa, Homo sapiens
  Table A; Target 100956; HLA-A*32:01; ZFP42; ENSG00000179059; CTA
IVGENSLEY

SEQ ID NO: 100957 - protein, 9 aa, Homo sapiens
  Table A; Target 100957; HLA-B*15:03; ZFP42; ENSG00000179059; CTA
IVGENSLEY

SEQ ID NO: 100958 - protein, 9 aa, Homo sapiens
  Table A; Target 100958; HLA-B*18:01; ZFP42; ENSG00000179059; CTA
IVGENSLEY

SEQ ID NO: 100959 - protein, 9 aa, Homo sapiens
  Table A; Target 100959; HLA-B*27:05; ZFP42; ENSG00000179059; CTA
IVGENSLEY

SEQ ID NO: 100960 - protein, 9 aa, Homo sapiens
  Table A; Target 100960; HLA-B*35:01; ZFP42; ENSG00000179059; CTA
IVGENSLEY

SEQ ID NO: 100961 - protein, 9 aa, Homo sapiens
  Table A; Target 100961; HLA-B*39:01; ZFP42; ENSG00000179059; CTA
IVGENSLEY

SEQ ID NO: 100962 - protein, 9 aa, Homo sapiens
  Table A; Target 100962; HLA-B*46:01; ZFP42; ENSG00000179059; CTA
IVGENSLEY

SEQ ID NO: 100963 - protein, 9 aa, Homo sapiens
  Table A; Target 100963; HLA-B*55:01; ZFP42; ENSG00000179059; CTA
IVGENSLEY

SEQ ID NO: 100964 - protein, 9 aa, Homo sapiens
  Table A; Target 100964; HLA-B*58:01; ZFP42; ENSG00000179059; CTA
IVGENSLEY

SEQ ID NO: 100965 - protein, 9 aa, Homo sapiens
  Table A; Target 100965; HLA-C*01:02; ZFP42; ENSG00000179059; CTA
IVGENSLEY

SEQ ID NO: 100966 - protein, 9 aa, Homo sapiens
  Table A; Target 100966; HLA-C*02:02; ZFP42; ENSG00000179059; CTA
IVGENSLEY

SEQ ID NO: 100967 - protein, 9 aa, Homo sapiens
  Table A; Target 100967; HLA-C*03:03; ZFP42; ENSG00000179059; CTA
IVGENSLEY

SEQ ID NO: 100968 - protein, 9 aa, Homo sapiens
  Table A; Target 100968; HLA-C*07:01; ZFP42; ENSG00000179059; CTA
IVGENSLEY

SEQ ID NO: 100969 - protein, 9 aa, Homo sapiens
  Table A; Target 100969; HLA-C*07:04; ZFP42; ENSG00000179059; CTA
IVGENSLEY

SEQ ID NO: 100970 - protein, 9 aa, Homo sapiens
  Table A; Target 100970; HLA-C*07:06; ZFP42; ENSG00000179059; CTA
IVGENSLEY

SEQ ID NO: 100971 - protein, 9 aa, Homo sapiens
  Table A; Target 100971; HLA-C*12:03; ZFP42; ENSG00000179059; CTA
IVGENSLEY

SEQ ID NO: 100972 - protein, 9 aa, Homo sapiens
  Table A; Target 100972; HLA-C*14:02; ZFP42; ENSG00000179059; CTA
IVGENSLEY

SEQ ID NO: 100973 - protein, 9 aa, Homo sapiens
  Table A; Target 100973; HLA-C*16:01; ZFP42; ENSG00000179059; CTA
IVGENSLEY

SEQ ID NO: 100974 - protein, 9 aa, Homo sapiens
  Table A; Target 100974; HLA-C*16:02; ZFP42; ENSG00000179059; CTA
IVGENSLEY

SEQ ID NO: 100975 - protein, 9 aa, Homo sapiens
  Table A; Target 100975; HLA-C*16:04; ZFP42; ENSG00000179059; CTA
IVGENSLEY

SEQ ID NO: 100976 - protein, 8 aa, Homo sapiens
  Table A; Target 100976; HLA-B*58:01; ZFP42; ENSG00000179059; CTA
KAFVESSK

SEQ ID NO: 100977 - protein, 8 aa, Homo sapiens
  Table A; Target 100977; HLA-C*03:04; ZFP42; ENSG00000179059; CTA
KAFVESSK

SEQ ID NO: 100978 - protein, 9 aa, Homo sapiens
  Table A; Target 100978; HLA-A*02:03; ZFP42; ENSG00000179059; CTA
KAFVESSKL

SEQ ID NO: 100979 - protein, 9 aa, Homo sapiens
  Table A; Target 100979; HLA-A*02:07; ZFP42; ENSG00000179059; CTA
KAFVESSKL

SEQ ID NO: 100980 - protein, 9 aa, Homo sapiens
  Table A; Target 100980; HLA-A*03:01; ZFP42; ENSG00000179059; CTA
KAFVESSKL

SEQ ID NO: 100981 - protein, 9 aa, Homo sapiens
  Table A; Target 100981; HLA-A*03:02; ZFP42; ENSG00000179059; CTA
KAFVESSKL

SEQ ID NO: 100982 - protein, 9 aa, Homo sapiens
  Table A; Target 100982; HLA-A*23:01; ZFP42; ENSG00000179059; CTA
KAFVESSKL

SEQ ID NO: 100983 - protein, 9 aa, Homo sapiens
  Table A; Target 100983; HLA-A*24:02; ZFP42; ENSG00000179059; CTA
KAFVESSKL

SEQ ID NO: 100984 - protein, 9 aa, Homo sapiens
  Table A; Target 100984; HLA-A*30:01; ZFP42; ENSG00000179059; CTA
KAFVESSKL

SEQ ID NO: 100985 - protein, 9 aa, Homo sapiens
  Table A; Target 100985; HLA-A*31:01; ZFP42; ENSG00000179059; CTA
KAFVESSKL

SEQ ID NO: 100986 - protein, 9 aa, Homo sapiens
  Table A; Target 100986; HLA-A*32:01; ZFP42; ENSG00000179059; CTA
KAFVESSKL

SEQ ID NO: 100987 - protein, 9 aa, Homo sapiens
  Table A; Target 100987; HLA-B*07:02; ZFP42; ENSG00000179059; CTA
KAFVESSKL

SEQ ID NO: 100988 - protein, 9 aa, Homo sapiens
  Table A; Target 100988; HLA-B*13:02; ZFP42; ENSG00000179059; CTA
KAFVESSKL

SEQ ID NO: 100989 - protein, 9 aa, Homo sapiens
  Table A; Target 100989; HLA-B*15:01; ZFP42; ENSG00000179059; CTA
KAFVESSKL

SEQ ID NO: 100990 - protein, 9 aa, Homo sapiens
  Table A; Target 100990; HLA-B*15:03; ZFP42; ENSG00000179059; CTA
KAFVESSKL

SEQ ID NO: 100991 - protein, 9 aa, Homo sapiens
  Table A; Target 100991; HLA-B*27:05; ZFP42; ENSG00000179059; CTA
KAFVESSKL

SEQ ID NO: 100992 - protein, 9 aa, Homo sapiens
  Table A; Target 100992; HLA-B*35:03; ZFP42; ENSG00000179059; CTA
KAFVESSKL

SEQ ID NO: 100993 - protein, 9 aa, Homo sapiens
  Table A; Target 100993; HLA-B*37:01; ZFP42; ENSG00000179059; CTA
KAFVESSKL

SEQ ID NO: 100994 - protein, 9 aa, Homo sapiens
  Table A; Target 100994; HLA-B*38:01; ZFP42; ENSG00000179059; CTA
KAFVESSKL

SEQ ID NO: 100995 - protein, 9 aa, Homo sapiens
  Table A; Target 100995; HLA-B*40:01; ZFP42; ENSG00000179059; CTA
KAFVESSKL

SEQ ID NO: 100996 - protein, 9 aa, Homo sapiens
  Table A; Target 100996; HLA-B*40:02; ZFP42; ENSG00000179059; CTA
KAFVESSKL

SEQ ID NO: 100997 - protein, 9 aa, Homo sapiens
  Table A; Target 100997; HLA-B*46:01; ZFP42; ENSG00000179059; CTA
KAFVESSKL

SEQ ID NO: 100998 - protein, 9 aa, Homo sapiens
  Table A; Target 100998; HLA-B*49:01; ZFP42; ENSG00000179059; CTA
KAFVESSKL

SEQ ID NO: 100999 - protein, 9 aa, Homo sapiens
  Table A; Target 100999; HLA-B*55:01; ZFP42; ENSG00000179059; CTA
KAFVESSKL

SEQ ID NO: 101000 - protein, 9 aa, Homo sapiens
  Table A; Target 101000; HLA-B*57:01; ZFP42; ENSG00000179059; CTA
KAFVESSKL

SEQ ID NO: 101001 - protein, 9 aa, Homo sapiens
  Table A; Target 101001; HLA-B*58:01; ZFP42; ENSG00000179059; CTA
KAFVESSKL

SEQ ID NO: 101002 - protein, 9 aa, Homo sapiens
  Table A; Target 101002; HLA-C*01:02; ZFP42; ENSG00000179059; CTA
KAFVESSKL

SEQ ID NO: 101003 - protein, 9 aa, Homo sapiens
  Table A; Target 101003; HLA-C*02:02; ZFP42; ENSG00000179059; CTA
KAFVESSKL

SEQ ID NO: 101004 - protein, 9 aa, Homo sapiens
  Table A; Target 101004; HLA-C*03:03; ZFP42; ENSG00000179059; CTA
KAFVESSKL

SEQ ID NO: 101005 - protein, 9 aa, Homo sapiens
  Table A; Target 101005; HLA-C*03:04; ZFP42; ENSG00000179059; CTA
KAFVESSKL

SEQ ID NO: 101006 - protein, 9 aa, Homo sapiens
  Table A; Target 101006; HLA-C*04:01; ZFP42; ENSG00000179059; CTA
KAFVESSKL

SEQ ID NO: 101007 - protein, 9 aa, Homo sapiens
  Table A; Target 101007; HLA-C*05:01; ZFP42; ENSG00000179059; CTA
KAFVESSKL

SEQ ID NO: 101008 - protein, 9 aa, Homo sapiens
  Table A; Target 101008; HLA-C*06:02; ZFP42; ENSG00000179059; CTA
KAFVESSKL

SEQ ID NO: 101009 - protein, 9 aa, Homo sapiens
  Table A; Target 101009; HLA-C*07:01; ZFP42; ENSG00000179059; CTA
KAFVESSKL

SEQ ID NO: 101010 - protein, 9 aa, Homo sapiens
  Table A; Target 101010; HLA-C*07:02; ZFP42; ENSG00000179059; CTA
KAFVESSKL

SEQ ID NO: 101011 - protein, 9 aa, Homo sapiens
  Table A; Target 101011; HLA-C*07:06; ZFP42; ENSG00000179059; CTA
KAFVESSKL

SEQ ID NO: 101012 - protein, 9 aa, Homo sapiens
  Table A; Target 101012; HLA-C*12:03; ZFP42; ENSG00000179059; CTA
KAFVESSKL

SEQ ID NO: 101013 - protein, 9 aa, Homo sapiens
  Table A; Target 101013; HLA-C*16:02; ZFP42; ENSG00000179059; CTA
KAFVESSKL

SEQ ID NO: 101014 - protein, 9 aa, Homo sapiens
  Table A; Target 101014; HLA-C*16:04; ZFP42; ENSG00000179059; CTA
KAFVESSKL

SEQ ID NO: 101015 - protein, 10 aa, Homo sapiens
  Table A; Target 101015; HLA-A*03:01; ZFP42; ENSG00000179059; CTA
KAFVESSKLK

SEQ ID NO: 101016 - protein, 10 aa, Homo sapiens
  Table A; Target 101016; HLA-A*03:02; ZFP42; ENSG00000179059; CTA
KAFVESSKLK

SEQ ID NO: 101017 - protein, 10 aa, Homo sapiens
  Table A; Target 101017; HLA-A*11:01; ZFP42; ENSG00000179059; CTA
KAFVESSKLK

SEQ ID NO: 101018 - protein, 10 aa, Homo sapiens
  Table A; Target 101018; HLA-A*31:01; ZFP42; ENSG00000179059; CTA
KAFVESSKLK

SEQ ID NO: 101019 - protein, 10 aa, Homo sapiens
  Table A; Target 101019; HLA-B*27:02; ZFP42; ENSG00000179059; CTA
KAFVESSKLK

SEQ ID NO: 101020 - protein, 10 aa, Homo sapiens
  Table A; Target 101020; HLA-B*57:01; ZFP42; ENSG00000179059; CTA
KAFVESSKLK

SEQ ID NO: 101021 - protein, 10 aa, Homo sapiens
  Table A; Target 101021; HLA-C*04:01; ZFP42; ENSG00000179059; CTA
KAFVESSKLK

SEQ ID NO: 101022 - protein, 10 aa, Homo sapiens
  Table A; Target 101022; HLA-C*06:02; ZFP42; ENSG00000179059; CTA
KAFVESSKLK

SEQ ID NO: 101023 - protein, 11 aa, Homo sapiens
  Table A; Target 101023; HLA-A*03:01; ZFP42; ENSG00000179059; CTA
KAFVESSKLKR

SEQ ID NO: 101024 - protein, 11 aa, Homo sapiens
  Table A; Target 101024; HLA-A*31:01; ZFP42; ENSG00000179059; CTA
KAFVESSKLKR

SEQ ID NO: 101025 - protein, 11 aa, Homo sapiens
  Table A; Target 101025; HLA-B*57:01; ZFP42; ENSG00000179059; CTA
KAFVESSKLKR

SEQ ID NO: 101026 - protein, 8 aa, Homo sapiens
  Table A; Target 101026; HLA-B*37:01; ZFP42; ENSG00000179059; CTA
KELPQKIV

SEQ ID NO: 101027 - protein, 9 aa, Homo sapiens
  Table A; Target 101027; HLA-B*40:02; ZFP42; ENSG00000179059; CTA
KELPQKIVG

SEQ ID NO: 101028 - protein, 8 aa, Homo sapiens
  Table A; Target 101028; HLA-B*37:01; ZFP42; ENSG00000179059; CTA
KEYDSLSA

SEQ ID NO: 101029 - protein, 8 aa, Homo sapiens
  Table A; Target 101029; HLA-B*49:01; ZFP42; ENSG00000179059; CTA
KEYDSLSA

SEQ ID NO: 101030 - protein, 9 aa, Homo sapiens
  Table A; Target 101030; HLA-A*30:01; ZFP42; ENSG00000179059; CTA
KEYDSLSAI

SEQ ID NO: 101031 - protein, 9 aa, Homo sapiens
  Table A; Target 101031; HLA-B*18:01; ZFP42; ENSG00000179059; CTA
KEYDSLSAI

SEQ ID NO: 101032 - protein, 9 aa, Homo sapiens
  Table A; Target 101032; HLA-B*37:01; ZFP42; ENSG00000179059; CTA
KEYDSLSAI

SEQ ID NO: 101033 - protein, 9 aa, Homo sapiens
  Table A; Target 101033; HLA-B*40:01; ZFP42; ENSG00000179059; CTA
KEYDSLSAI

SEQ ID NO: 101034 - protein, 9 aa, Homo sapiens
  Table A; Target 101034; HLA-B*40:02; ZFP42; ENSG00000179059; CTA
KEYDSLSAI

SEQ ID NO: 101035 - protein, 9 aa, Homo sapiens
  Table A; Target 101035; HLA-B*44:02; ZFP42; ENSG00000179059; CTA
KEYDSLSAI

SEQ ID NO: 101036 - protein, 9 aa, Homo sapiens
  Table A; Target 101036; HLA-B*44:03; ZFP42; ENSG00000179059; CTA
KEYDSLSAI

SEQ ID NO: 101037 - protein, 10 aa, Homo sapiens
  Table A; Target 101037; HLA-A*30:01; ZFP42; ENSG00000179059; CTA
KEYDSLSAIA

SEQ ID NO: 101038 - protein, 10 aa, Homo sapiens
  Table A; Target 101038; HLA-B*40:02; ZFP42; ENSG00000179059; CTA
KEYDSLSAIA

SEQ ID NO: 101039 - protein, 10 aa, Homo sapiens
  Table A; Target 101039; HLA-B*49:01; ZFP42; ENSG00000179059; CTA
KEYDSLSAIA

SEQ ID NO: 101040 - protein, 11 aa, Homo sapiens
  Table A; Target 101040; HLA-A*30:01; ZFP42; ENSG00000179059; CTA
KEYDSLSAIAC

SEQ ID NO: 101041 - protein, 11 aa, Homo sapiens
  Table A; Target 101041; HLA-B*40:01; ZFP42; ENSG00000179059; CTA
KEYDSLSAIAC

SEQ ID NO: 101042 - protein, 11 aa, Homo sapiens
  Table A; Target 101042; HLA-B*40:02; ZFP42; ENSG00000179059; CTA
KEYDSLSAIAC

SEQ ID NO: 101043 - protein, 11 aa, Homo sapiens
  Table A; Target 101043; HLA-B*49:01; ZFP42; ENSG00000179059; CTA
KEYDSLSAIAC

SEQ ID NO: 101044 - protein, 8 aa, Homo sapiens
  Table A; Target 101044; HLA-C*06:02; ZFP42; ENSG00000179059; CTA
KGLGGRAP

SEQ ID NO: 101045 - protein, 10 aa, Homo sapiens
  Table A; Target 101045; HLA-A*03:01; ZFP42; ENSG00000179059; CTA
KGSEQQLSQK

SEQ ID NO: 101046 - protein, 10 aa, Homo sapiens
  Table A; Target 101046; HLA-A*03:02; ZFP42; ENSG00000179059; CTA
KGSEQQLSQK

SEQ ID NO: 101047 - protein, 10 aa, Homo sapiens
  Table A; Target 101047; HLA-A*11:01; ZFP42; ENSG00000179059; CTA
KGSEQQLSQK

SEQ ID NO: 101048 - protein, 11 aa, Homo sapiens
  Table A; Target 101048; HLA-C*06:02; ZFP42; ENSG00000179059; CTA
KGSEQQLSQKV

SEQ ID NO: 101049 - protein, 9 aa, Homo sapiens
  Table A; Target 101049; HLA-A*31:01; ZFP42; ENSG00000179059; CTA
KHLLIHGPR

SEQ ID NO: 101050 - protein, 10 aa, Homo sapiens
  Table A; Target 101050; HLA-A*25:01; ZFP42; ENSG00000179059; CTA
KIVGENSLEY

SEQ ID NO: 101051 - protein, 10 aa, Homo sapiens
  Table A; Target 101051; HLA-A*26:01; ZFP42; ENSG00000179059; CTA
KIVGENSLEY

SEQ ID NO: 101052 - protein, 10 aa, Homo sapiens
  Table A; Target 101052; HLA-A*29:02; ZFP42; ENSG00000179059; CTA
KIVGENSLEY

SEQ ID NO: 101053 - protein, 10 aa, Homo sapiens
  Table A; Target 101053; HLA-A*30:02; ZFP42; ENSG00000179059; CTA
KIVGENSLEY

SEQ ID NO: 101054 - protein, 10 aa, Homo sapiens
  Table A; Target 101054; HLA-A*32:01; ZFP42; ENSG00000179059; CTA
KIVGENSLEY

SEQ ID NO: 101055 - protein, 10 aa, Homo sapiens
  Table A; Target 101055; HLA-B*15:03; ZFP42; ENSG00000179059; CTA
KIVGENSLEY

SEQ ID NO: 101056 - protein, 10 aa, Homo sapiens
  Table A; Target 101056; HLA-B*46:01; ZFP42; ENSG00000179059; CTA
KIVGENSLEY

SEQ ID NO: 101057 - protein, 10 aa, Homo sapiens
  Table A; Target 101057; HLA-B*57:01; ZFP42; ENSG00000179059; CTA
KIVGENSLEY

SEQ ID NO: 101058 - protein, 10 aa, Homo sapiens
  Table A; Target 101058; HLA-B*58:01; ZFP42; ENSG00000179059; CTA
KIVGENSLEY

SEQ ID NO: 101059 - protein, 10 aa, Homo sapiens
  Table A; Target 101059; HLA-C*16:04; ZFP42; ENSG00000179059; CTA
KIVGENSLEY

SEQ ID NO: 101060 - protein, 9 aa, Homo sapiens
  Table A; Target 101060; HLA-B*15:03; ZFP42; ENSG00000179059; CTA
KKPPINKEY

SEQ ID NO: 101061 - protein, 9 aa, Homo sapiens
  Table A; Target 101061; HLA-C*04:01; ZFP42; ENSG00000179059; CTA
KKPPINKEY

SEQ ID NO: 101062 - protein, 9 aa, Homo sapiens
  Table A; Target 101062; HLA-C*12:03; ZFP42; ENSG00000179059; CTA
KKPPINKEY

SEQ ID NO: 101063 - protein, 10 aa, Homo sapiens
  Table A; Target 101063; HLA-A*02:01; ZFP42; ENSG00000179059; CTA
KLPPGGIPGI

SEQ ID NO: 101064 - protein, 10 aa, Homo sapiens
  Table A; Target 101064; HLA-A*02:03; ZFP42; ENSG00000179059; CTA
KLPPGGIPGI

SEQ ID NO: 101065 - protein, 10 aa, Homo sapiens
  Table A; Target 101065; HLA-A*02:04; ZFP42; ENSG00000179059; CTA
KLPPGGIPGI

SEQ ID NO: 101066 - protein, 10 aa, Homo sapiens
  Table A; Target 101066; HLA-A*02:07; ZFP42; ENSG00000179059; CTA
KLPPGGIPGI

SEQ ID NO: 101067 - protein, 10 aa, Homo sapiens
  Table A; Target 101067; HLA-A*03:01; ZFP42; ENSG00000179059; CTA
KLPPGGIPGI

SEQ ID NO: 101068 - protein, 10 aa, Homo sapiens
  Table A; Target 101068; HLA-A*23:01; ZFP42; ENSG00000179059; CTA
KLPPGGIPGI

SEQ ID NO: 101069 - protein, 10 aa, Homo sapiens
  Table A; Target 101069; HLA-A*24:02; ZFP42; ENSG00000179059; CTA
KLPPGGIPGI

SEQ ID NO: 101070 - protein, 10 aa, Homo sapiens
  Table A; Target 101070; HLA-A*32:01; ZFP42; ENSG00000179059; CTA
KLPPGGIPGI

SEQ ID NO: 101071 - protein, 10 aa, Homo sapiens
  Table A; Target 101071; HLA-B*13:02; ZFP42; ENSG00000179059; CTA
KLPPGGIPGI

SEQ ID NO: 101072 - protein, 10 aa, Homo sapiens
  Table A; Target 101072; HLA-B*55:01; ZFP42; ENSG00000179059; CTA
KLPPGGIPGI

SEQ ID NO: 101073 - protein, 10 aa, Homo sapiens
  Table A; Target 101073; HLA-B*58:01; ZFP42; ENSG00000179059; CTA
KLPPGGIPGI

SEQ ID NO: 101074 - protein, 10 aa, Homo sapiens
  Table A; Target 101074; HLA-C*06:02; ZFP42; ENSG00000179059; CTA
KLPPGGIPGI

SEQ ID NO: 101075 - protein, 11 aa, Homo sapiens
  Table A; Target 101075; HLA-B*07:02; ZFP42; ENSG00000179059; CTA
KPPINKEYDSL

SEQ ID NO: 101076 - protein, 11 aa, Homo sapiens
  Table A; Target 101076; HLA-B*07:02; ZFP42; ENSG00000179059; CTA
KPRQGKSSQDL

SEQ ID NO: 101077 - protein, 11 aa, Homo sapiens
  Table A; Target 101077; HLA-C*07:02; ZFP42; ENSG00000179059; CTA
KPRQGKSSQDL

SEQ ID NO: 101078 - protein, 10 aa, Homo sapiens
  Table A; Target 101078; HLA-B*58:01; ZFP42; ENSG00000179059; CTA
KSSQDLQAEI

SEQ ID NO: 101079 - protein, 11 aa, Homo sapiens
  Table A; Target 101079; HLA-A*31:01; ZFP42; ENSG00000179059; CTA
KTRHQKGLGGR

SEQ ID NO: 101080 - protein, 8 aa, Homo sapiens
  Table A; Target 101080; HLA-A*32:01; ZFP42; ENSG00000179059; CTA
KVFEASSL

SEQ ID NO: 101081 - protein, 8 aa, Homo sapiens
  Table A; Target 101081; HLA-B*07:02; ZFP42; ENSG00000179059; CTA
KVFEASSL

SEQ ID NO: 101082 - protein, 8 aa, Homo sapiens
  Table A; Target 101082; HLA-B*08:01; ZFP42; ENSG00000179059; CTA
KVFEASSL

SEQ ID NO: 101083 - protein, 8 aa, Homo sapiens
  Table A; Target 101083; HLA-B*15:01; ZFP42; ENSG00000179059; CTA
KVFEASSL

SEQ ID NO: 101084 - protein, 8 aa, Homo sapiens
  Table A; Target 101084; HLA-B*15:03; ZFP42; ENSG00000179059; CTA
KVFEASSL

SEQ ID NO: 101085 - protein, 8 aa, Homo sapiens
  Table A; Target 101085; HLA-B*27:05; ZFP42; ENSG00000179059; CTA
KVFEASSL

SEQ ID NO: 101086 - protein, 8 aa, Homo sapiens
  Table A; Target 101086; HLA-B*37:01; ZFP42; ENSG00000179059; CTA
KVFEASSL

SEQ ID NO: 101087 - protein, 8 aa, Homo sapiens
  Table A; Target 101087; HLA-B*40:02; ZFP42; ENSG00000179059; CTA
KVFEASSL

SEQ ID NO: 101088 - protein, 8 aa, Homo sapiens
  Table A; Target 101088; HLA-B*46:01; ZFP42; ENSG00000179059; CTA
KVFEASSL

SEQ ID NO: 101089 - protein, 8 aa, Homo sapiens
  Table A; Target 101089; HLA-B*58:01; ZFP42; ENSG00000179059; CTA
KVFEASSL

SEQ ID NO: 101090 - protein, 8 aa, Homo sapiens
  Table A; Target 101090; HLA-C*01:02; ZFP42; ENSG00000179059; CTA
KVFEASSL

SEQ ID NO: 101091 - protein, 8 aa, Homo sapiens
  Table A; Target 101091; HLA-C*03:03; ZFP42; ENSG00000179059; CTA
KVFEASSL

SEQ ID NO: 101092 - protein, 8 aa, Homo sapiens
  Table A; Target 101092; HLA-C*03:04; ZFP42; ENSG00000179059; CTA
KVFEASSL

SEQ ID NO: 101093 - protein, 8 aa, Homo sapiens
  Table A; Target 101093; HLA-C*05:01; ZFP42; ENSG00000179059; CTA
KVFEASSL

SEQ ID NO: 101094 - protein, 8 aa, Homo sapiens
  Table A; Target 101094; HLA-C*07:02; ZFP42; ENSG00000179059; CTA
KVFEASSL

SEQ ID NO: 101095 - protein, 8 aa, Homo sapiens
  Table A; Target 101095; HLA-C*12:03; ZFP42; ENSG00000179059; CTA
KVFEASSL

SEQ ID NO: 101096 - protein, 8 aa, Homo sapiens
  Table A; Target 101096; HLA-C*14:02; ZFP42; ENSG00000179059; CTA
KVFEASSL

SEQ ID NO: 101097 - protein, 8 aa, Homo sapiens
  Table A; Target 101097; HLA-C*16:02; ZFP42; ENSG00000179059; CTA
KVFEASSL

SEQ ID NO: 101098 - protein, 10 aa, Homo sapiens
  Table A; Target 101098; HLA-A*02:01; ZFP42; ENSG00000179059; CTA
KVFEASSLEC

SEQ ID NO: 101099 - protein, 10 aa, Homo sapiens
  Table A; Target 101099; HLA-B*27:05; ZFP42; ENSG00000179059; CTA
KVFEASSLEC

SEQ ID NO: 101100 - protein, 10 aa, Homo sapiens
  Table A; Target 101100; HLA-B*40:02; ZFP42; ENSG00000179059; CTA
KVFEASSLEC

SEQ ID NO: 101101 - protein, 10 aa, Homo sapiens
  Table A; Target 101101; HLA-B*56:01; ZFP42; ENSG00000179059; CTA
KVFEASSLEC

SEQ ID NO: 101102 - protein, 10 aa, Homo sapiens
  Table A; Target 101102; HLA-C*01:02; ZFP42; ENSG00000179059; CTA
KVFEASSLEC

SEQ ID NO: 101103 - protein, 10 aa, Homo sapiens
  Table A; Target 101103; HLA-A*30:01; ZFP42; ENSG00000179059; CTA
LEEDSLFESL

SEQ ID NO: 101104 - protein, 10 aa, Homo sapiens
  Table A; Target 101104; HLA-B*18:01; ZFP42; ENSG00000179059; CTA
LEEDSLFESL

SEQ ID NO: 101105 - protein, 10 aa, Homo sapiens
  Table A; Target 101105; HLA-B*40:01; ZFP42; ENSG00000179059; CTA
LEEDSLFESL

SEQ ID NO: 101106 - protein, 10 aa, Homo sapiens
  Table A; Target 101106; HLA-B*40:02; ZFP42; ENSG00000179059; CTA
LEEDSLFESL

SEQ ID NO: 101107 - protein, 10 aa, Homo sapiens
  Table A; Target 101107; HLA-B*49:01; ZFP42; ENSG00000179059; CTA
LEEDSLFESL

SEQ ID NO: 101108 - protein, 8 aa, Homo sapiens
  Table A; Target 101108; HLA-B*49:01; ZFP42; ENSG00000179059; CTA
LEYMKKGV

SEQ ID NO: 101109 - protein, 9 aa, Homo sapiens
  Table A; Target 101109; HLA-B*40:02; ZFP42; ENSG00000179059; CTA
LEYSEYMTG

SEQ ID NO: 101110 - protein, 9 aa, Homo sapiens
  Table A; Target 101110; HLA-B*49:01; ZFP42; ENSG00000179059; CTA
LEYSEYMTG

SEQ ID NO: 101111 - protein, 10 aa, Homo sapiens
  Table A; Target 101111; HLA-A*03:01; ZFP42; ENSG00000179059; CTA
LEYSEYMTGK

SEQ ID NO: 101112 - protein, 10 aa, Homo sapiens
  Table A; Target 101112; HLA-A*11:01; ZFP42; ENSG00000179059; CTA
LEYSEYMTGK

SEQ ID NO: 101113 - protein, 10 aa, Homo sapiens
  Table A; Target 101113; HLA-B*27:02; ZFP42; ENSG00000179059; CTA
LEYSEYMTGK

SEQ ID NO: 101114 - protein, 10 aa, Homo sapiens
  Table A; Target 101114; HLA-B*49:01; ZFP42; ENSG00000179059; CTA
LEYSEYMTGK

SEQ ID NO: 101115 - protein, 8 aa, Homo sapiens
  Table A; Target 101115; HLA-C*04:01; ZFP42; ENSG00000179059; CTA
LFESLEYL

SEQ ID NO: 101116 - protein, 9 aa, Homo sapiens
  Table A; Target 101116; HLA-B*27:02; ZFP42; ENSG00000179059; CTA
LFESLEYLK

SEQ ID NO: 101117 - protein, 9 aa, Homo sapiens
  Table A; Target 101117; HLA-B*35:03; ZFP42; ENSG00000179059; CTA
LPPGGIPGI

SEQ ID NO: 101118 - protein, 9 aa, Homo sapiens
  Table A; Target 101118; HLA-B*54:01; ZFP42; ENSG00000179059; CTA
LPPGGIPGI

SEQ ID NO: 101119 - protein, 9 aa, Homo sapiens
  Table A; Target 101119; HLA-B*55:01; ZFP42; ENSG00000179059; CTA
LPPGGIPGI

SEQ ID NO: 101120 - protein, 9 aa, Homo sapiens
  Table A; Target 101120; HLA-B*56:01; ZFP42; ENSG00000179059; CTA
LPPGGIPGI

SEQ ID NO: 101121 - protein, 11 aa, Homo sapiens
  Table A; Target 101121; HLA-B*35:03; ZFP42; ENSG00000179059; CTA
LPPGGIPGIDL

SEQ ID NO: 101122 - protein, 11 aa, Homo sapiens
  Table A; Target 101122; HLA-C*04:01; ZFP42; ENSG00000179059; CTA
LPPGGIPGIDL

SEQ ID NO: 101123 - protein, 11 aa, Homo sapiens
  Table A; Target 101123; HLA-C*07:02; ZFP42; ENSG00000179059; CTA
LPPGGIPGIDL

SEQ ID NO: 101124 - protein, 11 aa, Homo sapiens
  Table A; Target 101124; HLA-B*07:02; ZFP42; ENSG00000179059; CTA
LPQKIVGENSL

SEQ ID NO: 101125 - protein, 11 aa, Homo sapiens
  Table A; Target 101125; HLA-B*35:01; ZFP42; ENSG00000179059; CTA
LPQKIVGENSL

SEQ ID NO: 101126 - protein, 11 aa, Homo sapiens
  Table A; Target 101126; HLA-B*35:03; ZFP42; ENSG00000179059; CTA
LPQKIVGENSL

SEQ ID NO: 101127 - protein, 10 aa, Homo sapiens
  Table A; Target 101127; HLA-A*02:03; ZFP42; ENSG00000179059; CTA
LQAEIEPVSA

SEQ ID NO: 101128 - protein, 10 aa, Homo sapiens
  Table A; Target 101128; HLA-B*27:05; ZFP42; ENSG00000179059; CTA
LQAEIEPVSA

SEQ ID NO: 101129 - protein, 9 aa, Homo sapiens
  Table A; Target 101129; HLA-A*01:01; ZFP42; ENSG00000179059; CTA
LSDPKQLAE

SEQ ID NO: 101130 - protein, 10 aa, Homo sapiens
  Table A; Target 101130; HLA-A*01:01; ZFP42; ENSG00000179059; CTA
LSDPKQLAEF

SEQ ID NO: 101131 - protein, 10 aa, Homo sapiens
  Table A; Target 101131; HLA-A*02:07; ZFP42; ENSG00000179059; CTA
LSDPKQLAEF

SEQ ID NO: 101132 - protein, 10 aa, Homo sapiens
  Table A; Target 101132; HLA-B*57:01; ZFP42; ENSG00000179059; CTA
LSDPKQLAEF

SEQ ID NO: 101133 - protein, 10 aa, Homo sapiens
  Table A; Target 101133; HLA-B*58:01; ZFP42; ENSG00000179059; CTA
LSDPKQLAEF

SEQ ID NO: 101134 - protein, 10 aa, Homo sapiens
  Table A; Target 101134; HLA-C*03:04; ZFP42; ENSG00000179059; CTA
LSDPKQLAEF

SEQ ID NO: 101135 - protein, 10 aa, Homo sapiens
  Table A; Target 101135; HLA-C*04:01; ZFP42; ENSG00000179059; CTA
LSDPKQLAEF

SEQ ID NO: 101136 - protein, 10 aa, Homo sapiens
  Table A; Target 101136; HLA-C*05:01; ZFP42; ENSG00000179059; CTA
LSDPKQLAEF

SEQ ID NO: 101137 - protein, 10 aa, Homo sapiens
  Table A; Target 101137; HLA-C*07:01; ZFP42; ENSG00000179059; CTA
LSDPKQLAEF

SEQ ID NO: 101138 - protein, 9 aa, Homo sapiens
  Table A; Target 101138; HLA-B*57:01; ZFP42; ENSG00000179059; CTA
LVHTGEKPF

SEQ ID NO: 101139 - protein, 9 aa, Homo sapiens
  Table A; Target 101139; HLA-C*16:01; ZFP42; ENSG00000179059; CTA
LVHTGEKPF

SEQ ID NO: 101140 - protein, 9 aa, Homo sapiens
  Table A; Target 101140; HLA-A*02:03; ZFP42; ENSG00000179059; CTA
NLKAHILTH

SEQ ID NO: 101141 - protein, 9 aa, Homo sapiens
  Table A; Target 101141; HLA-A*03:01; ZFP42; ENSG00000179059; CTA
NLKAHILTH

SEQ ID NO: 101142 - protein, 9 aa, Homo sapiens
  Table A; Target 101142; HLA-A*33:01; ZFP42; ENSG00000179059; CTA
NLKAHILTH

SEQ ID NO: 101143 - protein, 9 aa, Homo sapiens
  Table A; Target 101143; HLA-B*08:01; ZFP42; ENSG00000179059; CTA
NLKAHILTH

SEQ ID NO: 101144 - protein, 9 aa, Homo sapiens
  Table A; Target 101144; HLA-C*07:01; ZFP42; ENSG00000179059; CTA
NLKAHILTH

SEQ ID NO: 101145 - protein, 10 aa, Homo sapiens
  Table A; Target 101145; HLA-A*02:03; ZFP42; ENSG00000179059; CTA
NLKAHILTHA

SEQ ID NO: 101146 - protein, 8 aa, Homo sapiens
  Table A; Target 101146; HLA-B*08:01; ZFP42; ENSG00000179059; CTA
NNLKAHIL

SEQ ID NO: 101147 - protein, 8 aa, Homo sapiens
  Table A; Target 101147; HLA-B*18:01; ZFP42; ENSG00000179059; CTA
NSLEYSEY

SEQ ID NO: 101148 - protein, 8 aa, Homo sapiens
  Table A; Target 101148; HLA-B*35:01; ZFP42; ENSG00000179059; CTA
NSLEYSEY

SEQ ID NO: 101149 - protein, 8 aa, Homo sapiens
  Table A; Target 101149; HLA-B*39:01; ZFP42; ENSG00000179059; CTA
NSLEYSEY

SEQ ID NO: 101150 - protein, 8 aa, Homo sapiens
  Table A; Target 101150; HLA-B*46:01; ZFP42; ENSG00000179059; CTA
NSLEYSEY

SEQ ID NO: 101151 - protein, 8 aa, Homo sapiens
  Table A; Target 101151; HLA-C*01:02; ZFP42; ENSG00000179059; CTA
NSLEYSEY

SEQ ID NO: 101152 - protein, 8 aa, Homo sapiens
  Table A; Target 101152; HLA-C*07:01; ZFP42; ENSG00000179059; CTA
NSLEYSEY

SEQ ID NO: 101153 - protein, 8 aa, Homo sapiens
  Table A; Target 101153; HLA-C*14:02; ZFP42; ENSG00000179059; CTA
NSLEYSEY

SEQ ID NO: 101154 - protein, 8 aa, Homo sapiens
  Table A; Target 101154; HLA-C*16:01; ZFP42; ENSG00000179059; CTA
NSLEYSEY

SEQ ID NO: 101155 - protein, 9 aa, Homo sapiens
  Table A; Target 101155; HLA-A*01:01; ZFP42; ENSG00000179059; CTA
NSLEYSEYM

SEQ ID NO: 101156 - protein, 9 aa, Homo sapiens
  Table A; Target 101156; HLA-B*35:01; ZFP42; ENSG00000179059; CTA
NSLEYSEYM

SEQ ID NO: 101157 - protein, 9 aa, Homo sapiens
  Table A; Target 101157; HLA-B*35:03; ZFP42; ENSG00000179059; CTA
NSLEYSEYM

SEQ ID NO: 101158 - protein, 9 aa, Homo sapiens
  Table A; Target 101158; HLA-C*01:02; ZFP42; ENSG00000179059; CTA
NSLEYSEYM

SEQ ID NO: 101159 - protein, 9 aa, Homo sapiens
  Table A; Target 101159; HLA-C*04:01; ZFP42; ENSG00000179059; CTA
NSLEYSEYM

SEQ ID NO: 101160 - protein, 10 aa, Homo sapiens
  Table A; Target 101160; HLA-A*03:02; ZFP42; ENSG00000179059; CTA
NTNKNEQEGK

SEQ ID NO: 101161 - protein, 10 aa, Homo sapiens
  Table A; Target 101161; HLA-A*11:01; ZFP42; ENSG00000179059; CTA
NTNKNEQEGK

SEQ ID NO: 101162 - protein, 10 aa, Homo sapiens
  Table A; Target 101162; HLA-A*68:01; ZFP42; ENSG00000179059; CTA
NTNKNEQEGK

SEQ ID NO: 101163 - protein, 10 aa, Homo sapiens
  Table A; Target 101163; HLA-B*27:02; ZFP42; ENSG00000179059; CTA
NTNKNEQEGK

SEQ ID NO: 101164 - protein, 10 aa, Homo sapiens
  Table A; Target 101164; HLA-C*07:01; ZFP42; ENSG00000179059; CTA
NTNKNEQEGK

SEQ ID NO: 101165 - protein, 10 aa, Homo sapiens
  Table A; Target 101165; HLA-C*07:06; ZFP42; ENSG00000179059; CTA
NTNKNEQEGK

SEQ ID NO: 101166 - protein, 9 aa, Homo sapiens
  Table A; Target 101166; HLA-B*27:02; ZFP42; ENSG00000179059; CTA
PGIDLSDPK

SEQ ID NO: 101167 - protein, 11 aa, Homo sapiens
  Table A; Target 101167; HLA-C*04:01; ZFP42; ENSG00000179059; CTA
PGPQALGGDDF

SEQ ID NO: 101168 - protein, 10 aa, Homo sapiens
  Table A; Target 101168; HLA-B*07:02; ZFP42; ENSG00000179059; CTA
PPINKEYDSL

SEQ ID NO: 101169 - protein, 8 aa, Homo sapiens
  Table A; Target 101169; HLA-C*07:04; ZFP42; ENSG00000179059; CTA
PQKIVGEN

SEQ ID NO: 101170 - protein, 9 aa, Homo sapiens
  Table A; Target 101170; HLA-C*06:02; ZFP42; ENSG00000179059; CTA
PQSGCTRKL

SEQ ID NO: 101171 - protein, 8 aa, Homo sapiens
  Table A; Target 101171; HLA-B*07:02; ZFP42; ENSG00000179059; CTA
PVSAVWAL

SEQ ID NO: 101172 - protein, 9 aa, Homo sapiens
  Table A; Target 101172; HLA-B*54:01; ZFP42; ENSG00000179059; CTA
QAEIEPVSA

SEQ ID NO: 101173 - protein, 9 aa, Homo sapiens
  Table A; Target 101173; HLA-C*05:01; ZFP42; ENSG00000179059; CTA
QAEIEPVSA

SEQ ID NO: 101174 - protein, 11 aa, Homo sapiens
  Table A; Target 101174; HLA-B*57:01; ZFP42; ENSG00000179059; CTA
QAEIEPVSAVW

SEQ ID NO: 101175 - protein, 11 aa, Homo sapiens
  Table A; Target 101175; HLA-B*27:02; ZFP42; ENSG00000179059; CTA
QDLQAEIEPVS

SEQ ID NO: 101176 - protein, 9 aa, Homo sapiens
  Table A; Target 101176; HLA-B*15:03; ZFP42; ENSG00000179059; CTA
QKIVGENSL

SEQ ID NO: 101177 - protein, 9 aa, Homo sapiens
  Table A; Target 101177; HLA-B*38:01; ZFP42; ENSG00000179059; CTA
QKIVGENSL

SEQ ID NO: 101178 - protein, 9 aa, Homo sapiens
  Table A; Target 101178; HLA-B*39:01; ZFP42; ENSG00000179059; CTA
QKIVGENSL

SEQ ID NO: 101179 - protein, 9 aa, Homo sapiens
  Table A; Target 101179; HLA-B*15:03; ZFP42; ENSG00000179059; CTA
QKVFEASSL

SEQ ID NO: 101180 - protein, 9 aa, Homo sapiens
  Table A; Target 101180; HLA-B*38:01; ZFP42; ENSG00000179059; CTA
QKVFEASSL

SEQ ID NO: 101181 - protein, 9 aa, Homo sapiens
  Table A; Target 101181; HLA-B*39:01; ZFP42; ENSG00000179059; CTA
QKVFEASSL

SEQ ID NO: 101182 - protein, 9 aa, Homo sapiens
  Table A; Target 101182; HLA-A*03:01; ZFP42; ENSG00000179059; CTA
QLAEFARKK

SEQ ID NO: 101183 - protein, 9 aa, Homo sapiens
  Table A; Target 101183; HLA-A*03:02; ZFP42; ENSG00000179059; CTA
QLAEFARKK

SEQ ID NO: 101184 - protein, 9 aa, Homo sapiens
  Table A; Target 101184; HLA-A*11:01; ZFP42; ENSG00000179059; CTA
QLAEFARKK

SEQ ID NO: 101185 - protein, 9 aa, Homo sapiens
  Table A; Target 101185; HLA-A*02:01; ZFP42; ENSG00000179059; CTA
QLSQKVFEA

SEQ ID NO: 101186 - protein, 9 aa, Homo sapiens
  Table A; Target 101186; HLA-A*02:03; ZFP42; ENSG00000179059; CTA
QLSQKVFEA

SEQ ID NO: 101187 - protein, 9 aa, Homo sapiens
  Table A; Target 101187; HLA-A*02:04; ZFP42; ENSG00000179059; CTA
QLSQKVFEA

SEQ ID NO: 101188 - protein, 9 aa, Homo sapiens
  Table A; Target 101188; HLA-B*08:01; ZFP42; ENSG00000179059; CTA
QLSQKVFEA

SEQ ID NO: 101189 - protein, 9 aa, Homo sapiens
  Table A; Target 101189; HLA-B*13:02; ZFP42; ENSG00000179059; CTA
QLSQKVFEA

SEQ ID NO: 101190 - protein, 9 aa, Homo sapiens
  Table A; Target 101190; HLA-B*54:01; ZFP42; ENSG00000179059; CTA
QLSQKVFEA

SEQ ID NO: 101191 - protein, 9 aa, Homo sapiens
  Table A; Target 101191; HLA-B*55:01; ZFP42; ENSG00000179059; CTA
QLSQKVFEA

SEQ ID NO: 101192 - protein, 9 aa, Homo sapiens
  Table A; Target 101192; HLA-B*07:02; ZFP42; ENSG00000179059; CTA
QPILEEDSL

SEQ ID NO: 101193 - protein, 9 aa, Homo sapiens
  Table A; Target 101193; HLA-B*35:01; ZFP42; ENSG00000179059; CTA
QPILEEDSL

SEQ ID NO: 101194 - protein, 9 aa, Homo sapiens
  Table A; Target 101194; HLA-B*38:01; ZFP42; ENSG00000179059; CTA
QPILEEDSL

SEQ ID NO: 101195 - protein, 9 aa, Homo sapiens
  Table A; Target 101195; HLA-B*55:01; ZFP42; ENSG00000179059; CTA
QPILEEDSL

SEQ ID NO: 101196 - protein, 9 aa, Homo sapiens
  Table A; Target 101196; HLA-C*03:03; ZFP42; ENSG00000179059; CTA
QPILEEDSL

SEQ ID NO: 101197 - protein, 10 aa, Homo sapiens
  Table A; Target 101197; HLA-B*35:01; ZFP42; ENSG00000179059; CTA
QPILEEDSLF

SEQ ID NO: 101198 - protein, 10 aa, Homo sapiens
  Table A; Target 101198; HLA-B*55:01; ZFP42; ENSG00000179059; CTA
QPILEEDSLF

SEQ ID NO: 101199 - protein, 8 aa, Homo sapiens
  Table A; Target 101199; HLA-B*15:03; ZFP42; ENSG00000179059; CTA
QQLSQKVF

SEQ ID NO: 101200 - protein, 9 aa, Homo sapiens
  Table A; Target 101200; HLA-A*31:01; ZFP42; ENSG00000179059; CTA
RAPSGAKPR

SEQ ID NO: 101201 - protein, 8 aa, Homo sapiens
  Table A; Target 101201; HLA-A*23:01; ZFP42; ENSG00000179059; CTA
RFIQSNNL

SEQ ID NO: 101202 - protein, 9 aa, Homo sapiens
  Table A; Target 101202; HLA-A*31:01; ZFP42; ENSG00000179059; CTA
RFSLDFNLR

SEQ ID NO: 101203 - protein, 10 aa, Homo sapiens
  Table A; Target 101203; HLA-A*30:02; ZFP42; ENSG00000179059; CTA
RKKPPINKEY

SEQ ID NO: 101204 - protein, 9 aa, Homo sapiens
  Table A; Target 101204; HLA-B*27:05; ZFP42; ENSG00000179059; CTA
RRFIQSNNL

SEQ ID NO: 101205 - protein, 9 aa, Homo sapiens
  Table A; Target 101205; HLA-C*06:02; ZFP42; ENSG00000179059; CTA
RRFIQSNNL

SEQ ID NO: 101206 - protein, 10 aa, Homo sapiens
  Table A; Target 101206; HLA-B*27:05; ZFP42; ENSG00000179059; CTA
RRFIQSNNLK

SEQ ID NO: 101207 - protein, 10 aa, Homo sapiens
  Table A; Target 101207; HLA-C*06:02; ZFP42; ENSG00000179059; CTA
RRFIQSNNLK

SEQ ID NO: 101208 - protein, 9 aa, Homo sapiens
  Table A; Target 101208; HLA-A*24:02; ZFP42; ENSG00000179059; CTA
SDPKQLAEF

SEQ ID NO: 101209 - protein, 9 aa, Homo sapiens
  Table A; Target 101209; HLA-B*37:01; ZFP42; ENSG00000179059; CTA
SDPKQLAEF

SEQ ID NO: 101210 - protein, 9 aa, Homo sapiens
  Table A; Target 101210; HLA-B*44:02; ZFP42; ENSG00000179059; CTA
SDPKQLAEF

SEQ ID NO: 101211 - protein, 9 aa, Homo sapiens
  Table A; Target 101211; HLA-A*30:01; ZFP42; ENSG00000179059; CTA
SEQQLSQKV

SEQ ID NO: 101212 - protein, 9 aa, Homo sapiens
  Table A; Target 101212; HLA-B*13:02; ZFP42; ENSG00000179059; CTA
SEQQLSQKV

SEQ ID NO: 101213 - protein, 9 aa, Homo sapiens
  Table A; Target 101213; HLA-B*18:01; ZFP42; ENSG00000179059; CTA
SEQQLSQKV

SEQ ID NO: 101214 - protein, 9 aa, Homo sapiens
  Table A; Target 101214; HLA-B*27:02; ZFP42; ENSG00000179059; CTA
SEQQLSQKV

SEQ ID NO: 101215 - protein, 9 aa, Homo sapiens
  Table A; Target 101215; HLA-B*37:01; ZFP42; ENSG00000179059; CTA
SEQQLSQKV

SEQ ID NO: 101216 - protein, 9 aa, Homo sapiens
  Table A; Target 101216; HLA-B*40:01; ZFP42; ENSG00000179059; CTA
SEQQLSQKV

SEQ ID NO: 101217 - protein, 9 aa, Homo sapiens
  Table A; Target 101217; HLA-B*40:02; ZFP42; ENSG00000179059; CTA
SEQQLSQKV

SEQ ID NO: 101218 - protein, 9 aa, Homo sapiens
  Table A; Target 101218; HLA-B*44:02; ZFP42; ENSG00000179059; CTA
SEQQLSQKV

SEQ ID NO: 101219 - protein, 9 aa, Homo sapiens
  Table A; Target 101219; HLA-B*44:03; ZFP42; ENSG00000179059; CTA
SEQQLSQKV

SEQ ID NO: 101220 - protein, 9 aa, Homo sapiens
  Table A; Target 101220; HLA-B*49:01; ZFP42; ENSG00000179059; CTA
SEQQLSQKV

SEQ ID NO: 101221 - protein, 9 aa, Homo sapiens
  Table A; Target 101221; HLA-C*16:04; ZFP42; ENSG00000179059; CTA
SEQQLSQKV

SEQ ID NO: 101222 - protein, 10 aa, Homo sapiens
  Table A; Target 101222; HLA-A*30:01; ZFP42; ENSG00000179059; CTA
SEQQLSQKVF

SEQ ID NO: 101223 - protein, 10 aa, Homo sapiens
  Table A; Target 101223; HLA-B*18:01; ZFP42; ENSG00000179059; CTA
SEQQLSQKVF

SEQ ID NO: 101224 - protein, 10 aa, Homo sapiens
  Table A; Target 101224; HLA-B*27:02; ZFP42; ENSG00000179059; CTA
SEQQLSQKVF

SEQ ID NO: 101225 - protein, 10 aa, Homo sapiens
  Table A; Target 101225; HLA-B*37:01; ZFP42; ENSG00000179059; CTA
SEQQLSQKVF

SEQ ID NO: 101226 - protein, 10 aa, Homo sapiens
  Table A; Target 101226; HLA-B*40:01; ZFP42; ENSG00000179059; CTA
SEQQLSQKVF

SEQ ID NO: 101227 - protein, 10 aa, Homo sapiens
  Table A; Target 101227; HLA-B*40:02; ZFP42; ENSG00000179059; CTA
SEQQLSQKVF

SEQ ID NO: 101228 - protein, 10 aa, Homo sapiens
  Table A; Target 101228; HLA-C*16:04; ZFP42; ENSG00000179059; CTA
SEQQLSQKVF

SEQ ID NO: 101229 - protein, 9 aa, Homo sapiens
  Table A; Target 101229; HLA-A*30:01; ZFP42; ENSG00000179059; CTA
SEYMTGKKL

SEQ ID NO: 101230 - protein, 9 aa, Homo sapiens
  Table A; Target 101230; HLA-B*18:01; ZFP42; ENSG00000179059; CTA
SEYMTGKKL

SEQ ID NO: 101231 - protein, 9 aa, Homo sapiens
  Table A; Target 101231; HLA-B*27:02; ZFP42; ENSG00000179059; CTA
SEYMTGKKL

SEQ ID NO: 101232 - protein, 9 aa, Homo sapiens
  Table A; Target 101232; HLA-B*37:01; ZFP42; ENSG00000179059; CTA
SEYMTGKKL

SEQ ID NO: 101233 - protein, 9 aa, Homo sapiens
  Table A; Target 101233; HLA-B*40:01; ZFP42; ENSG00000179059; CTA
SEYMTGKKL

SEQ ID NO: 101234 - protein, 9 aa, Homo sapiens
  Table A; Target 101234; HLA-B*40:02; ZFP42; ENSG00000179059; CTA
SEYMTGKKL

SEQ ID NO: 101235 - protein, 9 aa, Homo sapiens
  Table A; Target 101235; HLA-B*44:02; ZFP42; ENSG00000179059; CTA
SEYMTGKKL

SEQ ID NO: 101236 - protein, 9 aa, Homo sapiens
  Table A; Target 101236; HLA-B*49:01; ZFP42; ENSG00000179059; CTA
SEYMTGKKL

SEQ ID NO: 101237 - protein, 9 aa, Homo sapiens
  Table A; Target 101237; HLA-C*02:02; ZFP42; ENSG00000179059; CTA
SEYMTGKKL

SEQ ID NO: 101238 - protein, 9 aa, Homo sapiens
  Table A; Target 101238; HLA-C*16:04; ZFP42; ENSG00000179059; CTA
SEYMTGKKL

SEQ ID NO: 101239 - protein, 10 aa, Homo sapiens
  Table A; Target 101239; HLA-B*40:02; ZFP42; ENSG00000179059; CTA
SEYMTGKKLP

SEQ ID NO: 101240 - protein, 9 aa, Homo sapiens
  Table A; Target 101240; HLA-A*03:01; ZFP42; ENSG00000179059; CTA
SLDFNLRTH

SEQ ID NO: 101241 - protein, 10 aa, Homo sapiens
  Table A; Target 101241; HLA-A*01:01; ZFP42; ENSG00000179059; CTA
SLDFNLRTHV

SEQ ID NO: 101242 - protein, 10 aa, Homo sapiens
  Table A; Target 101242; HLA-A*02:01; ZFP42; ENSG00000179059; CTA
SLDFNLRTHV

SEQ ID NO: 101243 - protein, 10 aa, Homo sapiens
  Table A; Target 101243; HLA-A*02:03; ZFP42; ENSG00000179059; CTA
SLDFNLRTHV

SEQ ID NO: 101244 - protein, 10 aa, Homo sapiens
  Table A; Target 101244; HLA-A*02:07; ZFP42; ENSG00000179059; CTA
SLDFNLRTHV

SEQ ID NO: 101245 - protein, 8 aa, Homo sapiens
  Table A; Target 101245; HLA-A*01:01; ZFP42; ENSG00000179059; CTA
SLECSLEY

SEQ ID NO: 101246 - protein, 9 aa, Homo sapiens
  Table A; Target 101246; HLA-C*06:02; ZFP42; ENSG00000179059; CTA
SLEYMKKGV

SEQ ID NO: 101247 - protein, 11 aa, Homo sapiens
  Table A; Target 101247; HLA-A*03:01; ZFP42; ENSG00000179059; CTA
SLEYSEYMTGK

SEQ ID NO: 101248 - protein, 11 aa, Homo sapiens
  Table A; Target 101248; HLA-A*03:02; ZFP42; ENSG00000179059; CTA
SLEYSEYMTGK

SEQ ID NO: 101249 - protein, 8 aa, Homo sapiens
  Table A; Target 101249; HLA-A*01:01; ZFP42; ENSG00000179059; CTA
SLFESLEY

SEQ ID NO: 101250 - protein, 8 aa, Homo sapiens
  Table A; Target 101250; HLA-A*03:01; ZFP42; ENSG00000179059; CTA
SLFESLEY

SEQ ID NO: 101251 - protein, 8 aa, Homo sapiens
  Table A; Target 101251; HLA-A*26:01; ZFP42; ENSG00000179059; CTA
SLFESLEY

SEQ ID NO: 101252 - protein, 8 aa, Homo sapiens
  Table A; Target 101252; HLA-A*29:02; ZFP42; ENSG00000179059; CTA
SLFESLEY

SEQ ID NO: 101253 - protein, 8 aa, Homo sapiens
  Table A; Target 101253; HLA-A*30:02; ZFP42; ENSG00000179059; CTA
SLFESLEY

SEQ ID NO: 101254 - protein, 8 aa, Homo sapiens
  Table A; Target 101254; HLA-A*32:01; ZFP42; ENSG00000179059; CTA
SLFESLEY

SEQ ID NO: 101255 - protein, 8 aa, Homo sapiens
  Table A; Target 101255; HLA-B*13:02; ZFP42; ENSG00000179059; CTA
SLFESLEY

SEQ ID NO: 101256 - protein, 8 aa, Homo sapiens
  Table A; Target 101256; HLA-B*15:01; ZFP42; ENSG00000179059; CTA
SLFESLEY

SEQ ID NO: 101257 - protein, 8 aa, Homo sapiens
  Table A; Target 101257; HLA-B*15:03; ZFP42; ENSG00000179059; CTA
SLFESLEY

SEQ ID NO: 101258 - protein, 8 aa, Homo sapiens
  Table A; Target 101258; HLA-B*18:01; ZFP42; ENSG00000179059; CTA
SLFESLEY

SEQ ID NO: 101259 - protein, 8 aa, Homo sapiens
  Table A; Target 101259; HLA-B*35:01; ZFP42; ENSG00000179059; CTA
SLFESLEY

SEQ ID NO: 101260 - protein, 8 aa, Homo sapiens
  Table A; Target 101260; HLA-B*39:01; ZFP42; ENSG00000179059; CTA
SLFESLEY

SEQ ID NO: 101261 - protein, 8 aa, Homo sapiens
  Table A; Target 101261; HLA-B*46:01; ZFP42; ENSG00000179059; CTA
SLFESLEY

SEQ ID NO: 101262 - protein, 8 aa, Homo sapiens
  Table A; Target 101262; HLA-C*02:02; ZFP42; ENSG00000179059; CTA
SLFESLEY

SEQ ID NO: 101263 - protein, 8 aa, Homo sapiens
  Table A; Target 101263; HLA-C*03:03; ZFP42; ENSG00000179059; CTA
SLFESLEY

SEQ ID NO: 101264 - protein, 8 aa, Homo sapiens
  Table A; Target 101264; HLA-C*07:01; ZFP42; ENSG00000179059; CTA
SLFESLEY

SEQ ID NO: 101265 - protein, 8 aa, Homo sapiens
  Table A; Target 101265; HLA-C*07:04; ZFP42; ENSG00000179059; CTA
SLFESLEY

SEQ ID NO: 101266 - protein, 8 aa, Homo sapiens
  Table A; Target 101266; HLA-C*14:02; ZFP42; ENSG00000179059; CTA
SLFESLEY

SEQ ID NO: 101267 - protein, 8 aa, Homo sapiens
  Table A; Target 101267; HLA-C*16:01; ZFP42; ENSG00000179059; CTA
SLFESLEY

SEQ ID NO: 101268 - protein, 9 aa, Homo sapiens
  Table A; Target 101268; HLA-A*02:03; ZFP42; ENSG00000179059; CTA
SLFESLEYL

SEQ ID NO: 101269 - protein, 9 aa, Homo sapiens
  Table A; Target 101269; HLA-A*02:04; ZFP42; ENSG00000179059; CTA
SLFESLEYL

SEQ ID NO: 101270 - protein, 9 aa, Homo sapiens
  Table A; Target 101270; HLA-A*02:07; ZFP42; ENSG00000179059; CTA
SLFESLEYL

SEQ ID NO: 101271 - protein, 9 aa, Homo sapiens
  Table A; Target 101271; HLA-A*68:02; ZFP42; ENSG00000179059; CTA
SLFESLEYL

SEQ ID NO: 101272 - protein, 9 aa, Homo sapiens
  Table A; Target 101272; HLA-B*13:02; ZFP42; ENSG00000179059; CTA
SLFESLEYL

SEQ ID NO: 101273 - protein, 9 aa, Homo sapiens
  Table A; Target 101273; HLA-B*40:01; ZFP42; ENSG00000179059; CTA
SLFESLEYL

SEQ ID NO: 101274 - protein, 9 aa, Homo sapiens
  Table A; Target 101274; HLA-B*40:02; ZFP42; ENSG00000179059; CTA
SLFESLEYL

SEQ ID NO: 101275 - protein, 9 aa, Homo sapiens
  Table A; Target 101275; HLA-B*55:01; ZFP42; ENSG00000179059; CTA
SLFESLEYL

SEQ ID NO: 101276 - protein, 9 aa, Homo sapiens
  Table A; Target 101276; HLA-C*01:02; ZFP42; ENSG00000179059; CTA
SLFESLEYL

SEQ ID NO: 101277 - protein, 10 aa, Homo sapiens
  Table A; Target 101277; HLA-A*03:01; ZFP42; ENSG00000179059; CTA
SLFESLEYLK

SEQ ID NO: 101278 - protein, 10 aa, Homo sapiens
  Table A; Target 101278; HLA-A*03:02; ZFP42; ENSG00000179059; CTA
SLFESLEYLK

SEQ ID NO: 101279 - protein, 10 aa, Homo sapiens
  Table A; Target 101279; HLA-A*11:01; ZFP42; ENSG00000179059; CTA
SLFESLEYLK

SEQ ID NO: 101280 - protein, 10 aa, Homo sapiens
  Table A; Target 101280; HLA-B*27:02; ZFP42; ENSG00000179059; CTA
SLFESLEYLK

SEQ ID NO: 101281 - protein, 11 aa, Homo sapiens
  Table A; Target 101281; HLA-A*03:01; ZFP42; ENSG00000179059; CTA
SLFESLEYLKK

SEQ ID NO: 101282 - protein, 11 aa, Homo sapiens
  Table A; Target 101282; HLA-A*11:01; ZFP42; ENSG00000179059; CTA
SLFESLEYLKK

SEQ ID NO: 101283 - protein, 9 aa, Homo sapiens
  Table A; Target 101283; HLA-A*03:02; ZFP42; ENSG00000179059; CTA
SLSAIACPQ

SEQ ID NO: 101284 - protein, 9 aa, Homo sapiens
  Table A; Target 101284; HLA-C*06:02; ZFP42; ENSG00000179059; CTA
SLSAIACPQ

SEQ ID NO: 101285 - protein, 9 aa, Homo sapiens
  Table A; Target 101285; HLA-B*08:01; ZFP42; ENSG00000179059; CTA
SNNLKAHIL

SEQ ID NO: 101286 - protein, 8 aa, Homo sapiens
  Table A; Target 101286; HLA-B*13:02; ZFP42; ENSG00000179059; CTA
SQDLQAEI

SEQ ID NO: 101287 - protein, 8 aa, Homo sapiens
  Table A; Target 101287; HLA-B*38:01; ZFP42; ENSG00000179059; CTA
SQDLQAEI

SEQ ID NO: 101288 - protein, 8 aa, Homo sapiens
  Table A; Target 101288; HLA-C*05:01; ZFP42; ENSG00000179059; CTA
SQDLQAEI

SEQ ID NO: 101289 - protein, 10 aa, Homo sapiens
  Table A; Target 101289; HLA-B*15:01; ZFP42; ENSG00000179059; CTA
SQKVFEASSL

SEQ ID NO: 101290 - protein, 10 aa, Homo sapiens
  Table A; Target 101290; HLA-B*40:02; ZFP42; ENSG00000179059; CTA
SQKVFEASSL

SEQ ID NO: 101291 - protein, 9 aa, Homo sapiens
  Table A; Target 101291; HLA-A*01:01; ZFP42; ENSG00000179059; CTA
SSLECSLEY

SEQ ID NO: 101292 - protein, 9 aa, Homo sapiens
  Table A; Target 101292; HLA-A*03:01; ZFP42; ENSG00000179059; CTA
SSLECSLEY

SEQ ID NO: 101293 - protein, 9 aa, Homo sapiens
  Table A; Target 101293; HLA-A*11:01; ZFP42; ENSG00000179059; CTA
SSLECSLEY

SEQ ID NO: 101294 - protein, 9 aa, Homo sapiens
  Table A; Target 101294; HLA-A*26:01; ZFP42; ENSG00000179059; CTA
SSLECSLEY

SEQ ID NO: 101295 - protein, 9 aa, Homo sapiens
  Table A; Target 101295; HLA-A*30:02; ZFP42; ENSG00000179059; CTA
SSLECSLEY

SEQ ID NO: 101296 - protein, 9 aa, Homo sapiens
  Table A; Target 101296; HLA-B*35:01; ZFP42; ENSG00000179059; CTA
SSLECSLEY

SEQ ID NO: 101297 - protein, 9 aa, Homo sapiens
  Table A; Target 101297; HLA-B*46:01; ZFP42; ENSG00000179059; CTA
SSLECSLEY

SEQ ID NO: 101298 - protein, 9 aa, Homo sapiens
  Table A; Target 101298; HLA-B*57:01; ZFP42; ENSG00000179059; CTA
SSLECSLEY

SEQ ID NO: 101299 - protein, 9 aa, Homo sapiens
  Table A; Target 101299; HLA-B*58:01; ZFP42; ENSG00000179059; CTA
SSLECSLEY

SEQ ID NO: 101300 - protein, 9 aa, Homo sapiens
  Table A; Target 101300; HLA-C*01:02; ZFP42; ENSG00000179059; CTA
SSLECSLEY

SEQ ID NO: 101301 - protein, 9 aa, Homo sapiens
  Table A; Target 101301; HLA-C*03:03; ZFP42; ENSG00000179059; CTA
SSLECSLEY

SEQ ID NO: 101302 - protein, 9 aa, Homo sapiens
  Table A; Target 101302; HLA-C*07:01; ZFP42; ENSG00000179059; CTA
SSLECSLEY

SEQ ID NO: 101303 - protein, 9 aa, Homo sapiens
  Table A; Target 101303; HLA-C*07:06; ZFP42; ENSG00000179059; CTA
SSLECSLEY

SEQ ID NO: 101304 - protein, 9 aa, Homo sapiens
  Table A; Target 101304; HLA-C*16:01; ZFP42; ENSG00000179059; CTA
SSLECSLEY

SEQ ID NO: 101305 - protein, 9 aa, Homo sapiens
  Table A; Target 101305; HLA-C*16:02; ZFP42; ENSG00000179059; CTA
SSLECSLEY

SEQ ID NO: 101306 - protein, 9 aa, Homo sapiens
  Table A; Target 101306; HLA-C*16:04; ZFP42; ENSG00000179059; CTA
SSLECSLEY

SEQ ID NO: 101307 - protein, 9 aa, Homo sapiens
  Table A; Target 101307; HLA-B*13:02; ZFP42; ENSG00000179059; CTA
SSQDLQAEI

SEQ ID NO: 101308 - protein, 9 aa, Homo sapiens
  Table A; Target 101308; HLA-A*33:01; ZFP42; ENSG00000179059; CTA
TNKNEQEGK

SEQ ID NO: 101309 - protein, 9 aa, Homo sapiens
  Table A; Target 101309; HLA-A*33:03; ZFP42; ENSG00000179059; CTA
TNKNEQEGK

SEQ ID NO: 101310 - protein, 9 aa, Homo sapiens
  Table A; Target 101310; HLA-C*16:01; ZFP42; ENSG00000179059; CTA
VCAECGKAF

SEQ ID NO: 101311 - protein, 9 aa, Homo sapiens
  Table A; Target 101311; HLA-B*54:01; ZFP42; ENSG00000179059; CTA
VCYEPGPQA

SEQ ID NO: 101312 - protein, 9 aa, Homo sapiens
  Table A; Target 101312; HLA-B*55:01; ZFP42; ENSG00000179059; CTA
VCYEPGPQA

SEQ ID NO: 101313 - protein, 9 aa, Homo sapiens
  Table A; Target 101313; HLA-B*56:01; ZFP42; ENSG00000179059; CTA
VCYEPGPQA

SEQ ID NO: 101314 - protein, 9 aa, Homo sapiens
  Table A; Target 101314; HLA-C*03:03; ZFP42; ENSG00000179059; CTA
VCYEPGPQA

SEQ ID NO: 101315 - protein, 9 aa, Homo sapiens
  Table A; Target 101315; HLA-C*03:04; ZFP42; ENSG00000179059; CTA
VCYEPGPQA

SEQ ID NO: 101316 - protein, 9 aa, Homo sapiens
  Table A; Target 101316; HLA-C*12:03; ZFP42; ENSG00000179059; CTA
VCYEPGPQA

SEQ ID NO: 101317 - protein, 10 aa, Homo sapiens
  Table A; Target 101317; HLA-A*02:01; ZFP42; ENSG00000179059; CTA
VCYEPGPQAL

SEQ ID NO: 101318 - protein, 10 aa, Homo sapiens
  Table A; Target 101318; HLA-A*02:03; ZFP42; ENSG00000179059; CTA
VCYEPGPQAL

SEQ ID NO: 101319 - protein, 10 aa, Homo sapiens
  Table A; Target 101319; HLA-A*03:01; ZFP42; ENSG00000179059; CTA
VCYEPGPQAL

SEQ ID NO: 101320 - protein, 10 aa, Homo sapiens
  Table A; Target 101320; HLA-A*23:01; ZFP42; ENSG00000179059; CTA
VCYEPGPQAL

SEQ ID NO: 101321 - protein, 10 aa, Homo sapiens
  Table A; Target 101321; HLA-A*24:02; ZFP42; ENSG00000179059; CTA
VCYEPGPQAL

SEQ ID NO: 101322 - protein, 10 aa, Homo sapiens
  Table A; Target 101322; HLA-A*30:01; ZFP42; ENSG00000179059; CTA
VCYEPGPQAL

SEQ ID NO: 101323 - protein, 10 aa, Homo sapiens
  Table A; Target 101323; HLA-A*31:01; ZFP42; ENSG00000179059; CTA
VCYEPGPQAL

SEQ ID NO: 101324 - protein, 10 aa, Homo sapiens
  Table A; Target 101324; HLA-A*32:01; ZFP42; ENSG00000179059; CTA
VCYEPGPQAL

SEQ ID NO: 101325 - protein, 10 aa, Homo sapiens
  Table A; Target 101325; HLA-B*07:02; ZFP42; ENSG00000179059; CTA
VCYEPGPQAL

SEQ ID NO: 101326 - protein, 10 aa, Homo sapiens
  Table A; Target 101326; HLA-B*13:02; ZFP42; ENSG00000179059; CTA
VCYEPGPQAL

SEQ ID NO: 101327 - protein, 10 aa, Homo sapiens
  Table A; Target 101327; HLA-B*15:01; ZFP42; ENSG00000179059; CTA
VCYEPGPQAL

SEQ ID NO: 101328 - protein, 10 aa, Homo sapiens
  Table A; Target 101328; HLA-B*15:03; ZFP42; ENSG00000179059; CTA
VCYEPGPQAL

SEQ ID NO: 101329 - protein, 10 aa, Homo sapiens
  Table A; Target 101329; HLA-B*27:05; ZFP42; ENSG00000179059; CTA
VCYEPGPQAL

SEQ ID NO: 101330 - protein, 10 aa, Homo sapiens
  Table A; Target 101330; HLA-B*35:03; ZFP42; ENSG00000179059; CTA
VCYEPGPQAL

SEQ ID NO: 101331 - protein, 10 aa, Homo sapiens
  Table A; Target 101331; HLA-B*38:01; ZFP42; ENSG00000179059; CTA
VCYEPGPQAL

SEQ ID NO: 101332 - protein, 10 aa, Homo sapiens
  Table A; Target 101332; HLA-B*39:01; ZFP42; ENSG00000179059; CTA
VCYEPGPQAL

SEQ ID NO: 101333 - protein, 10 aa, Homo sapiens
  Table A; Target 101333; HLA-B*40:01; ZFP42; ENSG00000179059; CTA
VCYEPGPQAL

SEQ ID NO: 101334 - protein, 10 aa, Homo sapiens
  Table A; Target 101334; HLA-B*40:02; ZFP42; ENSG00000179059; CTA
VCYEPGPQAL

SEQ ID NO: 101335 - protein, 10 aa, Homo sapiens
  Table A; Target 101335; HLA-B*46:01; ZFP42; ENSG00000179059; CTA
VCYEPGPQAL

SEQ ID NO: 101336 - protein, 10 aa, Homo sapiens
  Table A; Target 101336; HLA-B*51:01; ZFP42; ENSG00000179059; CTA
VCYEPGPQAL

SEQ ID NO: 101337 - protein, 10 aa, Homo sapiens
  Table A; Target 101337; HLA-B*55:01; ZFP42; ENSG00000179059; CTA
VCYEPGPQAL

SEQ ID NO: 101338 - protein, 10 aa, Homo sapiens
  Table A; Target 101338; HLA-B*58:01; ZFP42; ENSG00000179059; CTA
VCYEPGPQAL

SEQ ID NO: 101339 - protein, 10 aa, Homo sapiens
  Table A; Target 101339; HLA-C*01:02; ZFP42; ENSG00000179059; CTA
VCYEPGPQAL

SEQ ID NO: 101340 - protein, 10 aa, Homo sapiens
  Table A; Target 101340; HLA-C*02:02; ZFP42; ENSG00000179059; CTA
VCYEPGPQAL

SEQ ID NO: 101341 - protein, 10 aa, Homo sapiens
  Table A; Target 101341; HLA-C*03:03; ZFP42; ENSG00000179059; CTA
VCYEPGPQAL

SEQ ID NO: 101342 - protein, 10 aa, Homo sapiens
  Table A; Target 101342; HLA-C*04:01; ZFP42; ENSG00000179059; CTA
VCYEPGPQAL

SEQ ID NO: 101343 - protein, 10 aa, Homo sapiens
  Table A; Target 101343; HLA-C*05:01; ZFP42; ENSG00000179059; CTA
VCYEPGPQAL

SEQ ID NO: 101344 - protein, 10 aa, Homo sapiens
  Table A; Target 101344; HLA-C*06:02; ZFP42; ENSG00000179059; CTA
VCYEPGPQAL

SEQ ID NO: 101345 - protein, 10 aa, Homo sapiens
  Table A; Target 101345; HLA-C*07:01; ZFP42; ENSG00000179059; CTA
VCYEPGPQAL

SEQ ID NO: 101346 - protein, 10 aa, Homo sapiens
  Table A; Target 101346; HLA-C*07:02; ZFP42; ENSG00000179059; CTA
VCYEPGPQAL

SEQ ID NO: 101347 - protein, 10 aa, Homo sapiens
  Table A; Target 101347; HLA-C*07:04; ZFP42; ENSG00000179059; CTA
VCYEPGPQAL

SEQ ID NO: 101348 - protein, 10 aa, Homo sapiens
  Table A; Target 101348; HLA-C*07:06; ZFP42; ENSG00000179059; CTA
VCYEPGPQAL

SEQ ID NO: 101349 - protein, 10 aa, Homo sapiens
  Table A; Target 101349; HLA-C*12:03; ZFP42; ENSG00000179059; CTA
VCYEPGPQAL

SEQ ID NO: 101350 - protein, 10 aa, Homo sapiens
  Table A; Target 101350; HLA-C*14:02; ZFP42; ENSG00000179059; CTA
VCYEPGPQAL

SEQ ID NO: 101351 - protein, 10 aa, Homo sapiens
  Table A; Target 101351; HLA-C*16:01; ZFP42; ENSG00000179059; CTA
VCYEPGPQAL

SEQ ID NO: 101352 - protein, 10 aa, Homo sapiens
  Table A; Target 101352; HLA-C*16:02; ZFP42; ENSG00000179059; CTA
VCYEPGPQAL

SEQ ID NO: 101353 - protein, 10 aa, Homo sapiens
  Table A; Target 101353; HLA-C*16:04; ZFP42; ENSG00000179059; CTA
VCYEPGPQAL

SEQ ID NO: 101354 - protein, 9 aa, Homo sapiens
  Table A; Target 101354; HLA-C*07:01; ZFP42; ENSG00000179059; CTA
VFEASSLEC

SEQ ID NO: 101355 - protein, 8 aa, Homo sapiens
  Table A; Target 101355; HLA-A*01:01; ZFP42; ENSG00000179059; CTA
VGENSLEY

SEQ ID NO: 101356 - protein, 8 aa, Homo sapiens
  Table A; Target 101356; HLA-B*39:01; ZFP42; ENSG00000179059; CTA
VGENSLEY

SEQ ID NO: 101357 - protein, 8 aa, Homo sapiens
  Table A; Target 101357; HLA-B*46:01; ZFP42; ENSG00000179059; CTA
VGENSLEY

SEQ ID NO: 101358 - protein, 8 aa, Homo sapiens
  Table A; Target 101358; HLA-C*05:01; ZFP42; ENSG00000179059; CTA
VGENSLEY

SEQ ID NO: 101359 - protein, 8 aa, Homo sapiens
  Table A; Target 101359; HLA-C*07:01; ZFP42; ENSG00000179059; CTA
VGENSLEY

SEQ ID NO: 101360 - protein, 11 aa, Homo sapiens
  Table A; Target 101360; HLA-A*01:01; ZFP42; ENSG00000179059; CTA
VGENSLEYSEY

SEQ ID NO: 101361 - protein, 8 aa, Homo sapiens
  Table A; Target 101361; HLA-B*27:05; ZFP42; ENSG00000179059; CTA
VRIHTGEK

SEQ ID NO: 101362 - protein, 9 aa, Homo sapiens
  Table A; Target 101362; HLA-B*27:05; ZFP42; ENSG00000179059; CTA
VRIHTGEKR

SEQ ID NO: 101363 - protein, 9 aa, Homo sapiens
  Table A; Target 101363; HLA-B*37:01; ZFP42; ENSG00000179059; CTA
YDSLSAIAC

SEQ ID NO: 101364 - protein, 9 aa, Homo sapiens
  Table A; Target 101364; HLA-B*40:02; ZFP42; ENSG00000179059; CTA
YDSLSAIAC

SEQ ID NO: 101365 - protein, 8 aa, Homo sapiens
  Table A; Target 101365; HLA-A*30:01; ZFP42; ENSG00000179059; CTA
YEPGPQAL

SEQ ID NO: 101366 - protein, 8 aa, Homo sapiens
  Table A; Target 101366; HLA-B*07:02; ZFP42; ENSG00000179059; CTA
YEPGPQAL

SEQ ID NO: 101367 - protein, 8 aa, Homo sapiens
  Table A; Target 101367; HLA-B*08:01; ZFP42; ENSG00000179059; CTA
YEPGPQAL

SEQ ID NO: 101368 - protein, 8 aa, Homo sapiens
  Table A; Target 101368; HLA-B*18:01; ZFP42; ENSG00000179059; CTA
YEPGPQAL

SEQ ID NO: 101369 - protein, 8 aa, Homo sapiens
  Table A; Target 101369; HLA-B*37:01; ZFP42; ENSG00000179059; CTA
YEPGPQAL

SEQ ID NO: 101370 - protein, 8 aa, Homo sapiens
  Table A; Target 101370; HLA-B*39:01; ZFP42; ENSG00000179059; CTA
YEPGPQAL

SEQ ID NO: 101371 - protein, 8 aa, Homo sapiens
  Table A; Target 101371; HLA-B*40:01; ZFP42; ENSG00000179059; CTA
YEPGPQAL

SEQ ID NO: 101372 - protein, 8 aa, Homo sapiens
  Table A; Target 101372; HLA-B*40:02; ZFP42; ENSG00000179059; CTA
YEPGPQAL

SEQ ID NO: 101373 - protein, 8 aa, Homo sapiens
  Table A; Target 101373; HLA-B*44:02; ZFP42; ENSG00000179059; CTA
YEPGPQAL

SEQ ID NO: 101374 - protein, 8 aa, Homo sapiens
  Table A; Target 101374; HLA-B*44:03; ZFP42; ENSG00000179059; CTA
YEPGPQAL

SEQ ID NO: 101375 - protein, 8 aa, Homo sapiens
  Table A; Target 101375; HLA-B*49:01; ZFP42; ENSG00000179059; CTA
YEPGPQAL

SEQ ID NO: 101376 - protein, 8 aa, Homo sapiens
  Table A; Target 101376; HLA-C*01:02; ZFP42; ENSG00000179059; CTA
YEPGPQAL

SEQ ID NO: 101377 - protein, 8 aa, Homo sapiens
  Table A; Target 101377; HLA-C*02:02; ZFP42; ENSG00000179059; CTA
YEPGPQAL

SEQ ID NO: 101378 - protein, 8 aa, Homo sapiens
  Table A; Target 101378; HLA-C*03:03; ZFP42; ENSG00000179059; CTA
YEPGPQAL

SEQ ID NO: 101379 - protein, 8 aa, Homo sapiens
  Table A; Target 101379; HLA-C*03:04; ZFP42; ENSG00000179059; CTA
YEPGPQAL

SEQ ID NO: 101380 - protein, 8 aa, Homo sapiens
  Table A; Target 101380; HLA-C*04:01; ZFP42; ENSG00000179059; CTA
YEPGPQAL

SEQ ID NO: 101381 - protein, 8 aa, Homo sapiens
  Table A; Target 101381; HLA-C*05:01; ZFP42; ENSG00000179059; CTA
YEPGPQAL

SEQ ID NO: 101382 - protein, 8 aa, Homo sapiens
  Table A; Target 101382; HLA-C*06:02; ZFP42; ENSG00000179059; CTA
YEPGPQAL

SEQ ID NO: 101383 - protein, 8 aa, Homo sapiens
  Table A; Target 101383; HLA-C*07:01; ZFP42; ENSG00000179059; CTA
YEPGPQAL

SEQ ID NO: 101384 - protein, 8 aa, Homo sapiens
  Table A; Target 101384; HLA-C*07:02; ZFP42; ENSG00000179059; CTA
YEPGPQAL

SEQ ID NO: 101385 - protein, 8 aa, Homo sapiens
  Table A; Target 101385; HLA-C*07:04; ZFP42; ENSG00000179059; CTA
YEPGPQAL

SEQ ID NO: 101386 - protein, 8 aa, Homo sapiens
  Table A; Target 101386; HLA-C*12:03; ZFP42; ENSG00000179059; CTA
YEPGPQAL

SEQ ID NO: 101387 - protein, 8 aa, Homo sapiens
  Table A; Target 101387; HLA-C*16:01; ZFP42; ENSG00000179059; CTA
YEPGPQAL

SEQ ID NO: 101388 - protein, 8 aa, Homo sapiens
  Table A; Target 101388; HLA-C*16:02; ZFP42; ENSG00000179059; CTA
YEPGPQAL

SEQ ID NO: 101389 - protein, 8 aa, Homo sapiens
  Table A; Target 101389; HLA-C*16:04; ZFP42; ENSG00000179059; CTA
YEPGPQAL

SEQ ID NO: 101390 - protein, 9 aa, Homo sapiens
  Table A; Target 101390; HLA-B*49:01; ZFP42; ENSG00000179059; CTA
YEPGPQALG

SEQ ID NO: 101391 - protein, 10 aa, Homo sapiens
  Table A; Target 101391; HLA-A*02:03; ZFP42; ENSG00000179059; CTA
YLKKGSEQQL

SEQ ID NO: 101392 - protein, 10 aa, Homo sapiens
  Table A; Target 101392; HLA-B*08:01; ZFP42; ENSG00000179059; CTA
YLKKGSEQQL

SEQ ID NO: 101393 - protein, 10 aa, Homo sapiens
  Table A; Target 101393; HLA-B*40:02; ZFP42; ENSG00000179059; CTA
YLKKGSEQQL

SEQ ID NO: 101394 - protein, 8 aa, Homo sapiens
  Table A; Target 101394; HLA-B*27:02; ZFP42; ENSG00000179059; CTA
YSEYMTGK

SEQ ID NO: 101395 - protein, 9 aa, Homo sapiens
  Table A; Target 101395; HLA-A*01:01; ZFP42; ENSG00000179059; CTA
YSEYMTGKK

SEQ ID NO: 101396 - protein, 10 aa, Homo sapiens
  Table A; Target 101396; HLA-B*54:01; ZFP42; ENSG00000179059; CTA
YVCYEPGPQA

SEQ ID NO: 101397 - protein, 9 aa, Homo sapiens
  Table A; Target 101397; HLA-B*40:02; ZNF560; ENSG00000198028; CTA
AEKTSECNA

SEQ ID NO: 101398 - protein, 9 aa, Homo sapiens
  Table A; Target 101398; HLA-A*24:02; ZNF560; ENSG00000198028; CTA
AFASFSARI

SEQ ID NO: 101399 - protein, 8 aa, Homo sapiens
  Table A; Target 101399; HLA-C*14:02; ZNF560; ENSG00000198028; CTA
AFGTSAGL

SEQ ID NO: 101400 - protein, 8 aa, Homo sapiens
  Table A; Target 101400; HLA-A*23:01; ZNF560; ENSG00000198028; CTA
AFISYPSL

SEQ ID NO: 101401 - protein, 8 aa, Homo sapiens
  Table A; Target 101401; HLA-C*14:02; ZNF560; ENSG00000198028; CTA
AFISYPSL

SEQ ID NO: 101402 - protein, 9 aa, Homo sapiens
  Table A; Target 101402; HLA-A*23:01; ZNF560; ENSG00000198028; CTA
AFISYPSLF

SEQ ID NO: 101403 - protein, 9 aa, Homo sapiens
  Table A; Target 101403; HLA-A*24:02; ZNF560; ENSG00000198028; CTA
AFISYPSLF

SEQ ID NO: 101404 - protein, 9 aa, Homo sapiens
  Table A; Target 101404; HLA-A*29:02; ZNF560; ENSG00000198028; CTA
AFISYPSLF

SEQ ID NO: 101405 - protein, 9 aa, Homo sapiens
  Table A; Target 101405; HLA-C*14:02; ZNF560; ENSG00000198028; CTA
AFISYPSLF

SEQ ID NO: 101406 - protein, 8 aa, Homo sapiens
  Table A; Target 101406; HLA-C*16:01; ZNF560; ENSG00000198028; CTA
AFTERSDL

SEQ ID NO: 101407 - protein, 8 aa, Homo sapiens
  Table A; Target 101407; HLA-C*01:02; ZNF560; ENSG00000198028; CTA
AFVVSSSL

SEQ ID NO: 101408 - protein, 8 aa, Homo sapiens
  Table A; Target 101408; HLA-C*14:02; ZNF560; ENSG00000198028; CTA
AFVVSSSL

SEQ ID NO: 101409 - protein, 8 aa, Homo sapiens
  Table A; Target 101409; HLA-B*08:01; ZNF560; ENSG00000198028; CTA
AIKHQTSV

SEQ ID NO: 101410 - protein, 8 aa, Homo sapiens
  Table A; Target 101410; HLA-B*15:03; ZNF560; ENSG00000198028; CTA
AKDLLSLY

SEQ ID NO: 101411 - protein, 8 aa, Homo sapiens
  Table A; Target 101411; HLA-B*15:03; ZNF560; ENSG00000198028; CTA
AKVGFQLF

SEQ ID NO: 101412 - protein, 9 aa, Homo sapiens
  Table A; Target 101412; HLA-A*02:01; ZNF560; ENSG00000198028; CTA
ALQQEFWKI

SEQ ID NO: 101413 - protein, 9 aa, Homo sapiens
  Table A; Target 101413; HLA-A*02:04; ZNF560; ENSG00000198028; CTA
ALQQEFWKI

SEQ ID NO: 101414 - protein, 9 aa, Homo sapiens
  Table A; Target 101414; HLA-A*02:07; ZNF560; ENSG00000198028; CTA
ALQQEFWKI

SEQ ID NO: 101415 - protein, 9 aa, Homo sapiens
  Table A; Target 101415; HLA-A*02:01; ZNF560; ENSG00000198028; CTA
ALWQDNFCL

SEQ ID NO: 101416 - protein, 9 aa, Homo sapiens
  Table A; Target 101416; HLA-A*02:04; ZNF560; ENSG00000198028; CTA
ALWQDNFCL

SEQ ID NO: 101417 - protein, 10 aa, Homo sapiens
  Table A; Target 101417; HLA-A*03:01; ZNF560; ENSG00000198028; CTA
ALWQDNFCLK

SEQ ID NO: 101418 - protein, 9 aa, Homo sapiens
  Table A; Target 101418; HLA-B*27:05; ZNF560; ENSG00000198028; CTA
ARIAHLKTH

SEQ ID NO: 101419 - protein, 9 aa, Homo sapiens
  Table A; Target 101419; HLA-B*27:02; ZNF560; ENSG00000198028; CTA
ARNQNGEEL

SEQ ID NO: 101420 - protein, 9 aa, Homo sapiens
  Table A; Target 101420; HLA-B*27:05; ZNF560; ENSG00000198028; CTA
ARNQNGEEL

SEQ ID NO: 101421 - protein, 9 aa, Homo sapiens
  Table A; Target 101421; HLA-B*38:01; ZNF560; ENSG00000198028; CTA
ARNQNGEEL

SEQ ID NO: 101422 - protein, 9 aa, Homo sapiens
  Table A; Target 101422; HLA-B*39:01; ZNF560; ENSG00000198028; CTA
ARNQNGEEL

SEQ ID NO: 101423 - protein, 9 aa, Homo sapiens
  Table A; Target 101423; HLA-C*16:04; ZNF560; ENSG00000198028; CTA
ARNQNGEEL

SEQ ID NO: 101424 - protein, 10 aa, Homo sapiens
  Table A; Target 101424; HLA-B*27:02; ZNF560; ENSG00000198028; CTA
ARNQNGEELY

SEQ ID NO: 101425 - protein, 10 aa, Homo sapiens
  Table A; Target 101425; HLA-B*27:05; ZNF560; ENSG00000198028; CTA
ARNQNGEELY

SEQ ID NO: 101426 - protein, 10 aa, Homo sapiens
  Table A; Target 101426; HLA-C*16:04; ZNF560; ENSG00000198028; CTA
ARNQNGEELY

SEQ ID NO: 101427 - protein, 9 aa, Homo sapiens
  Table A; Target 101427; HLA-A*32:01; ZNF560; ENSG00000198028; CTA
ASFSARIAH

SEQ ID NO: 101428 - protein, 9 aa, Homo sapiens
  Table A; Target 101428; HLA-C*16:01; ZNF560; ENSG00000198028; CTA
ASFSARIAH

SEQ ID NO: 101429 - protein, 11 aa, Homo sapiens
  Table A; Target 101429; HLA-A*03:01; ZNF560; ENSG00000198028; CTA
ASFSARIAHLK

SEQ ID NO: 101430 - protein, 9 aa, Homo sapiens
  Table A; Target 101430; HLA-A*01:01; ZNF560; ENSG00000198028; CTA
AVDFTQEEW

SEQ ID NO: 101431 - protein, 9 aa, Homo sapiens
  Table A; Target 101431; HLA-B*58:01; ZNF560; ENSG00000198028; CTA
AVDFTQEEW

SEQ ID NO: 101432 - protein, 9 aa, Homo sapiens
  Table A; Target 101432; HLA-B*58:01; ZNF560; ENSG00000198028; CTA
AVEFTQEEW

SEQ ID NO: 101433 - protein, 9 aa, Homo sapiens
  Table A; Target 101433; HLA-A*24:02; ZNF560; ENSG00000198028; CTA
AVNVETHII

SEQ ID NO: 101434 - protein, 9 aa, Homo sapiens
  Table A; Target 101434; HLA-A*25:01; ZNF560; ENSG00000198028; CTA
AVNVETHII

SEQ ID NO: 101435 - protein, 9 aa, Homo sapiens
  Table A; Target 101435; HLA-A*32:01; ZNF560; ENSG00000198028; CTA
AVNVETHII

SEQ ID NO: 101436 - protein, 9 aa, Homo sapiens
  Table A; Target 101436; HLA-B*13:02; ZNF560; ENSG00000198028; CTA
AVNVETHII

SEQ ID NO: 101437 - protein, 9 aa, Homo sapiens
  Table A; Target 101437; HLA-B*37:01; ZNF560; ENSG00000198028; CTA
AVNVETHII

SEQ ID NO: 101438 - protein, 9 aa, Homo sapiens
  Table A; Target 101438; HLA-B*38:01; ZNF560; ENSG00000198028; CTA
AVNVETHII

SEQ ID NO: 101439 - protein, 9 aa, Homo sapiens
  Table A; Target 101439; HLA-B*58:01; ZNF560; ENSG00000198028; CTA
AVNVETHII

SEQ ID NO: 101440 - protein, 9 aa, Homo sapiens
  Table A; Target 101440; HLA-C*01:02; ZNF560; ENSG00000198028; CTA
AVNVETHII

SEQ ID NO: 101441 - protein, 9 aa, Homo sapiens
  Table A; Target 101441; HLA-C*12:03; ZNF560; ENSG00000198028; CTA
AVNVETHII

SEQ ID NO: 101442 - protein, 10 aa, Homo sapiens
  Table A; Target 101442; HLA-A*03:01; ZNF560; ENSG00000198028; CTA
AVNVETHIIK

SEQ ID NO: 101443 - protein, 10 aa, Homo sapiens
  Table A; Target 101443; HLA-A*03:02; ZNF560; ENSG00000198028; CTA
AVNVETHIIK

SEQ ID NO: 101444 - protein, 10 aa, Homo sapiens
  Table A; Target 101444; HLA-A*11:01; ZNF560; ENSG00000198028; CTA
AVNVETHIIK

SEQ ID NO: 101445 - protein, 10 aa, Homo sapiens
  Table A; Target 101445; HLA-C*07:01; ZNF560; ENSG00000198028; CTA
AYCLTNCYQY

SEQ ID NO: 101446 - protein, 9 aa, Homo sapiens
  Table A; Target 101446; HLA-C*16:01; ZNF560; ENSG00000198028; CTA
CGNSFRNSM

SEQ ID NO: 101447 - protein, 9 aa, Homo sapiens
  Table A; Target 101447; HLA-B*38:01; ZNF560; ENSG00000198028; CTA
CHSDLTNHV

SEQ ID NO: 101448 - protein, 9 aa, Homo sapiens
  Table A; Target 101448; HLA-B*39:01; ZNF560; ENSG00000198028; CTA
CHSDLTNHV

SEQ ID NO: 101449 - protein, 9 aa, Homo sapiens
  Table A; Target 101449; HLA-B*08:01; ZNF560; ENSG00000198028; CTA
CLKTKGPAL

SEQ ID NO: 101450 - protein, 9 aa, Homo sapiens
  Table A; Target 101450; HLA-A*31:01; ZNF560; ENSG00000198028; CTA
CSYLTKHLR

SEQ ID NO: 101451 - protein, 8 aa, Homo sapiens
  Table A; Target 101451; HLA-A*23:01; ZNF560; ENSG00000198028; CTA
CYQYSVTF

SEQ ID NO: 101452 - protein, 8 aa, Homo sapiens
  Table A; Target 101452; HLA-A*24:02; ZNF560; ENSG00000198028; CTA
CYQYSVTF

SEQ ID NO: 101453 - protein, 8 aa, Homo sapiens
  Table A; Target 101453; HLA-C*14:02; ZNF560; ENSG00000198028; CTA
CYQYSVTF

SEQ ID NO: 101454 - protein, 8 aa, Homo sapiens
  Table A; Target 101454; HLA-B*51:01; ZNF560; ENSG00000198028; CTA
DCGKAFVV

SEQ ID NO: 101455 - protein, 8 aa, Homo sapiens
  Table A; Target 101455; HLA-A*33:01; ZNF560; ENSG00000198028; CTA
DFRYPTHL

SEQ ID NO: 101456 - protein, 8 aa, Homo sapiens
  Table A; Target 101456; HLA-B*08:01; ZNF560; ENSG00000198028; CTA
DFRYPTHL

SEQ ID NO: 101457 - protein, 11 aa, Homo sapiens
  Table A; Target 101457; HLA-A*33:01; ZNF560; ENSG00000198028; CTA
DFRYPTHLNNH

SEQ ID NO: 101458 - protein, 9 aa, Homo sapiens
  Table A; Target 101458; HLA-B*15:03; ZNF560; ENSG00000198028; CTA
DKSFEGTDY

SEQ ID NO: 101459 - protein, 8 aa, Homo sapiens
  Table A; Target 101459; HLA-A*33:01; ZNF560; ENSG00000198028; CTA
DLLSLYNK

SEQ ID NO: 101460 - protein, 8 aa, Homo sapiens
  Table A; Target 101460; HLA-B*08:01; ZNF560; ENSG00000198028; CTA
DLTNHVRI

SEQ ID NO: 101461 - protein, 8 aa, Homo sapiens
  Table A; Target 101461; HLA-B*08:01; ZNF560; ENSG00000198028; CTA
DLVTFDSV

SEQ ID NO: 101462 - protein, 8 aa, Homo sapiens
  Table A; Target 101462; HLA-B*18:01; ZNF560; ENSG00000198028; CTA
DLVTFDSV

SEQ ID NO: 101463 - protein, 8 aa, Homo sapiens
  Table A; Target 101463; HLA-B*51:01; ZNF560; ENSG00000198028; CTA
DLVTFDSV

SEQ ID NO: 101464 - protein, 8 aa, Homo sapiens
  Table A; Target 101464; HLA-B*08:01; ZNF560; ENSG00000198028; CTA
DPAQRNLY

SEQ ID NO: 101465 - protein, 8 aa, Homo sapiens
  Table A; Target 101465; HLA-B*35:01; ZNF560; ENSG00000198028; CTA
DPAQRNLY

SEQ ID NO: 101466 - protein, 8 aa, Homo sapiens
  Table A; Target 101466; HLA-B*08:01; ZNF560; ENSG00000198028; CTA
DPVQRNLY

SEQ ID NO: 101467 - protein, 8 aa, Homo sapiens
  Table A; Target 101467; HLA-B*35:01; ZNF560; ENSG00000198028; CTA
DPVQRNLY

SEQ ID NO: 101468 - protein, 10 aa, Homo sapiens
  Table A; Target 101468; HLA-A*25:01; ZNF560; ENSG00000198028; CTA
DQCGKAFASF

SEQ ID NO: 101469 - protein, 10 aa, Homo sapiens
  Table A; Target 101469; HLA-A*26:01; ZNF560; ENSG00000198028; CTA
DQCGKAFASF

SEQ ID NO: 101470 - protein, 10 aa, Homo sapiens
  Table A; Target 101470; HLA-A*25:01; ZNF560; ENSG00000198028; CTA
DQCGKVFVSF

SEQ ID NO: 101471 - protein, 11 aa, Homo sapiens
  Table A; Target 101471; HLA-A*25:01; ZNF560; ENSG00000198028; CTA
DTAVDFTQEEW

SEQ ID NO: 101472 - protein, 10 aa, Homo sapiens
  Table A; Target 101472; HLA-A*25:01; ZNF560; ENSG00000198028; CTA
DVMLENYENV

SEQ ID NO: 101473 - protein, 10 aa, Homo sapiens
  Table A; Target 101473; HLA-A*25:01; ZNF560; ENSG00000198028; CTA
DVMLENYKNL

SEQ ID NO: 101474 - protein, 9 aa, Homo sapiens
  Table A; Target 101474; HLA-A*25:01; ZNF560; ENSG00000198028; CTA
EAFTHSTSH

SEQ ID NO: 101475 - protein, 9 aa, Homo sapiens
  Table A; Target 101475; HLA-A*26:01; ZNF560; ENSG00000198028; CTA
EAFTHSTSH

SEQ ID NO: 101476 - protein, 9 aa, Homo sapiens
  Table A; Target 101476; HLA-A*33:01; ZNF560; ENSG00000198028; CTA
EAFTHSTSH

SEQ ID NO: 101477 - protein, 9 aa, Homo sapiens
  Table A; Target 101477; HLA-A*33:03; ZNF560; ENSG00000198028; CTA
EAFTHSTSH

SEQ ID NO: 101478 - protein, 9 aa, Homo sapiens
  Table A; Target 101478; HLA-A*68:01; ZNF560; ENSG00000198028; CTA
EAFTHSTSH

SEQ ID NO: 101479 - protein, 9 aa, Homo sapiens
  Table A; Target 101479; HLA-B*18:01; ZNF560; ENSG00000198028; CTA
EAFTHSTSH

SEQ ID NO: 101480 - protein, 9 aa, Homo sapiens
  Table A; Target 101480; HLA-B*35:01; ZNF560; ENSG00000198028; CTA
EAFTHSTSH

SEQ ID NO: 101481 - protein, 9 aa, Homo sapiens
  Table A; Target 101481; HLA-B*35:03; ZNF560; ENSG00000198028; CTA
EAFTHSTSH

SEQ ID NO: 101482 - protein, 9 aa, Homo sapiens
  Table A; Target 101482; HLA-B*46:01; ZNF560; ENSG00000198028; CTA
EAFTHSTSH

SEQ ID NO: 101483 - protein, 9 aa, Homo sapiens
  Table A; Target 101483; HLA-B*51:01; ZNF560; ENSG00000198028; CTA
EAFTHSTSH

SEQ ID NO: 101484 - protein, 9 aa, Homo sapiens
  Table A; Target 101484; HLA-C*02:02; ZNF560; ENSG00000198028; CTA
EAFTHSTSH

SEQ ID NO: 101485 - protein, 9 aa, Homo sapiens
  Table A; Target 101485; HLA-C*07:06; ZNF560; ENSG00000198028; CTA
EAFTHSTSH

SEQ ID NO: 101486 - protein, 9 aa, Homo sapiens
  Table A; Target 101486; HLA-C*12:03; ZNF560; ENSG00000198028; CTA
EAFTHSTSH

SEQ ID NO: 101487 - protein, 9 aa, Homo sapiens
  Table A; Target 101487; HLA-C*16:04; ZNF560; ENSG00000198028; CTA
EAFTHSTSH

SEQ ID NO: 101488 - protein, 11 aa, Homo sapiens
  Table A; Target 101488; HLA-A*68:02; ZNF560; ENSG00000198028; CTA
EAFTHSTSHAV

SEQ ID NO: 101489 - protein, 9 aa, Homo sapiens
  Table A; Target 101489; HLA-B*40:01; ZNF560; ENSG00000198028; CTA
EEEEELSTL

SEQ ID NO: 101490 - protein, 11 aa, Homo sapiens
  Table A; Target 101490; HLA-B*27:02; ZNF560; ENSG00000198028; CTA
EEEEELSTLPR

SEQ ID NO: 101491 - protein, 8 aa, Homo sapiens
  Table A; Target 101491; HLA-B*18:01; ZNF560; ENSG00000198028; CTA
EEEELRTL

SEQ ID NO: 101492 - protein, 8 aa, Homo sapiens
  Table A; Target 101492; HLA-B*44:02; ZNF560; ENSG00000198028; CTA
EEEELRTL

SEQ ID NO: 101493 - protein, 11 aa, Homo sapiens
  Table A; Target 101493; HLA-A*30:01; ZNF560; ENSG00000198028; CTA
EEELSTLPRVL

SEQ ID NO: 101494 - protein, 11 aa, Homo sapiens
  Table A; Target 101494; HLA-B*18:01; ZNF560; ENSG00000198028; CTA
EEELSTLPRVL

SEQ ID NO: 101495 - protein, 11 aa, Homo sapiens
  Table A; Target 101495; HLA-B*40:01; ZNF560; ENSG00000198028; CTA
EEELSTLPRVL

SEQ ID NO: 101496 - protein, 11 aa, Homo sapiens
  Table A; Target 101496; HLA-B*40:02; ZNF560; ENSG00000198028; CTA
EEELSTLPRVL

SEQ ID NO: 101497 - protein, 11 aa, Homo sapiens
  Table A; Target 101497; HLA-B*44:02; ZNF560; ENSG00000198028; CTA
EEELSTLPRVL

SEQ ID NO: 101498 - protein, 11 aa, Homo sapiens
  Table A; Target 101498; HLA-B*44:03; ZNF560; ENSG00000198028; CTA
EEELSTLPRVL

SEQ ID NO: 101499 - protein, 10 aa, Homo sapiens
  Table A; Target 101499; HLA-B*44:02; ZNF560; ENSG00000198028; CTA
EELRTLQQGV

SEQ ID NO: 101500 - protein, 11 aa, Homo sapiens
  Table A; Target 101500; HLA-B*40:01; ZNF560; ENSG00000198028; CTA
EELRTLQQGVL

SEQ ID NO: 101501 - protein, 9 aa, Homo sapiens
  Table A; Target 101501; HLA-B*18:01; ZNF560; ENSG00000198028; CTA
EELSTLPRV

SEQ ID NO: 101502 - protein, 9 aa, Homo sapiens
  Table A; Target 101502; HLA-B*44:03; ZNF560; ENSG00000198028; CTA
EELSTLPRV

SEQ ID NO: 101503 - protein, 9 aa, Homo sapiens
  Table A; Target 101503; HLA-B*49:01; ZNF560; ENSG00000198028; CTA
EELSTLPRV

SEQ ID NO: 101504 - protein, 10 aa, Homo sapiens
  Table A; Target 101504; HLA-A*30:01; ZNF560; ENSG00000198028; CTA
EELSTLPRVL

SEQ ID NO: 101505 - protein, 10 aa, Homo sapiens
  Table A; Target 101505; HLA-B*18:01; ZNF560; ENSG00000198028; CTA
EELSTLPRVL

SEQ ID NO: 101506 - protein, 10 aa, Homo sapiens
  Table A; Target 101506; HLA-B*40:01; ZNF560; ENSG00000198028; CTA
EELSTLPRVL

SEQ ID NO: 101507 - protein, 10 aa, Homo sapiens
  Table A; Target 101507; HLA-B*40:02; ZNF560; ENSG00000198028; CTA
EELSTLPRVL

SEQ ID NO: 101508 - protein, 10 aa, Homo sapiens
  Table A; Target 101508; HLA-B*44:02; ZNF560; ENSG00000198028; CTA
EELSTLPRVL

SEQ ID NO: 101509 - protein, 10 aa, Homo sapiens
  Table A; Target 101509; HLA-B*44:03; ZNF560; ENSG00000198028; CTA
EELSTLPRVL

SEQ ID NO: 101510 - protein, 9 aa, Homo sapiens
  Table A; Target 101510; HLA-B*18:01; ZNF560; ENSG00000198028; CTA
EEWILLDPV

SEQ ID NO: 101511 - protein, 9 aa, Homo sapiens
  Table A; Target 101511; HLA-B*18:01; ZNF560; ENSG00000198028; CTA
EEWTLLDPA

SEQ ID NO: 101512 - protein, 9 aa, Homo sapiens
  Table A; Target 101512; HLA-A*25:01; ZNF560; ENSG00000198028; CTA
EGTDYGKAF

SEQ ID NO: 101513 - protein, 9 aa, Homo sapiens
  Table A; Target 101513; HLA-C*16:01; ZNF560; ENSG00000198028; CTA
EGTDYGKAF

SEQ ID NO: 101514 - protein, 9 aa, Homo sapiens
  Table A; Target 101514; HLA-B*08:01; ZNF560; ENSG00000198028; CTA
ELSTLPRVL

SEQ ID NO: 101515 - protein, 8 aa, Homo sapiens
  Table A; Target 101515; HLA-B*08:01; ZNF560; ENSG00000198028; CTA
ENVAKVGF

SEQ ID NO: 101516 - protein, 8 aa, Homo sapiens
  Table A; Target 101516; HLA-A*33:01; ZNF560; ENSG00000198028; CTA
ENYENVAK

SEQ ID NO: 101517 - protein, 8 aa, Homo sapiens
  Table A; Target 101517; HLA-A*33:03; ZNF560; ENSG00000198028; CTA
ENYENVAK

SEQ ID NO: 101518 - protein, 9 aa, Homo sapiens
  Table A; Target 101518; HLA-A*26:01; ZNF560; ENSG00000198028; CTA
ENYENVAKV

SEQ ID NO: 101519 - protein, 9 aa, Homo sapiens
  Table A; Target 101519; HLA-A*33:03; ZNF560; ENSG00000198028; CTA
ENYENVAKV

SEQ ID NO: 101520 - protein, 9 aa, Homo sapiens
  Table A; Target 101520; HLA-A*68:02; ZNF560; ENSG00000198028; CTA
ENYENVAKV

SEQ ID NO: 101521 - protein, 9 aa, Homo sapiens
  Table A; Target 101521; HLA-B*51:01; ZNF560; ENSG00000198028; CTA
ENYENVAKV

SEQ ID NO: 101522 - protein, 11 aa, Homo sapiens
  Table A; Target 101522; HLA-A*26:01; ZNF560; ENSG00000198028; CTA
ENYENVAKVGF

SEQ ID NO: 101523 - protein, 11 aa, Homo sapiens
  Table A; Target 101523; HLA-A*33:03; ZNF560; ENSG00000198028; CTA
ENYENVAKVGF

SEQ ID NO: 101524 - protein, 9 aa, Homo sapiens
  Table A; Target 101524; HLA-A*33:01; ZNF560; ENSG00000198028; CTA
ENYKNLSSV

SEQ ID NO: 101525 - protein, 9 aa, Homo sapiens
  Table A; Target 101525; HLA-B*51:01; ZNF560; ENSG00000198028; CTA
ENYKNLSSV

SEQ ID NO: 101526 - protein, 11 aa, Homo sapiens
  Table A; Target 101526; HLA-A*25:01; ZNF560; ENSG00000198028; CTA
ENYKNLSSVGY

SEQ ID NO: 101527 - protein, 11 aa, Homo sapiens
  Table A; Target 101527; HLA-A*26:01; ZNF560; ENSG00000198028; CTA
ENYKNLSSVGY

SEQ ID NO: 101528 - protein, 11 aa, Homo sapiens
  Table A; Target 101528; HLA-C*07:01; ZNF560; ENSG00000198028; CTA
ENYKNLSSVGY

SEQ ID NO: 101529 - protein, 9 aa, Homo sapiens
  Table A; Target 101529; HLA-B*27:05; ZNF560; ENSG00000198028; CTA
ERSDLTKHL

SEQ ID NO: 101530 - protein, 9 aa, Homo sapiens
  Table A; Target 101530; HLA-C*06:02; ZNF560; ENSG00000198028; CTA
ERSDLTKHL

SEQ ID NO: 101531 - protein, 9 aa, Homo sapiens
  Table A; Target 101531; HLA-A*01:01; ZNF560; ENSG00000198028; CTA
ETHIIKNPY

SEQ ID NO: 101532 - protein, 9 aa, Homo sapiens
  Table A; Target 101532; HLA-A*26:01; ZNF560; ENSG00000198028; CTA
ETHIIKNPY

SEQ ID NO: 101533 - protein, 9 aa, Homo sapiens
  Table A; Target 101533; HLA-A*33:03; ZNF560; ENSG00000198028; CTA
ETHIIKNPY

SEQ ID NO: 101534 - protein, 9 aa, Homo sapiens
  Table A; Target 101534; HLA-B*54:01; ZNF560; ENSG00000198028; CTA
FASFSARIA

SEQ ID NO: 101535 - protein, 9 aa, Homo sapiens
  Table A; Target 101535; HLA-C*02:02; ZNF560; ENSG00000198028; CTA
FASFSARIA

SEQ ID NO: 101536 - protein, 9 aa, Homo sapiens
  Table A; Target 101536; HLA-C*16:01; ZNF560; ENSG00000198028; CTA
FASFSARIA

SEQ ID NO: 101537 - protein, 8 aa, Homo sapiens
  Table A; Target 101537; HLA-A*30:01; ZNF560; ENSG00000198028; CTA
FDSVAVEF

SEQ ID NO: 101538 - protein, 8 aa, Homo sapiens
  Table A; Target 101538; HLA-B*18:01; ZNF560; ENSG00000198028; CTA
FDSVAVEF

SEQ ID NO: 101539 - protein, 8 aa, Homo sapiens
  Table A; Target 101539; HLA-B*37:01; ZNF560; ENSG00000198028; CTA
FDSVAVEF

SEQ ID NO: 101540 - protein, 8 aa, Homo sapiens
  Table A; Target 101540; HLA-B*40:02; ZNF560; ENSG00000198028; CTA
FDSVAVEF

SEQ ID NO: 101541 - protein, 8 aa, Homo sapiens
  Table A; Target 101541; HLA-C*07:04; ZNF560; ENSG00000198028; CTA
FDSVAVEF

SEQ ID NO: 101542 - protein, 8 aa, Homo sapiens
  Table A; Target 101542; HLA-B*18:01; ZNF560; ENSG00000198028; CTA
FEDTAVDF

SEQ ID NO: 101543 - protein, 8 aa, Homo sapiens
  Table A; Target 101543; HLA-B*37:01; ZNF560; ENSG00000198028; CTA
FEDTAVDF

SEQ ID NO: 101544 - protein, 8 aa, Homo sapiens
  Table A; Target 101544; HLA-B*40:01; ZNF560; ENSG00000198028; CTA
FEDTAVDF

SEQ ID NO: 101545 - protein, 8 aa, Homo sapiens
  Table A; Target 101545; HLA-C*03:03; ZNF560; ENSG00000198028; CTA
FEDTAVDF

SEQ ID NO: 101546 - protein, 8 aa, Homo sapiens
  Table A; Target 101546; HLA-C*04:01; ZNF560; ENSG00000198028; CTA
FEDTAVDF

SEQ ID NO: 101547 - protein, 8 aa, Homo sapiens
  Table A; Target 101547; HLA-C*05:01; ZNF560; ENSG00000198028; CTA
FEDTAVDF

SEQ ID NO: 101548 - protein, 8 aa, Homo sapiens
  Table A; Target 101548; HLA-B*27:02; ZNF560; ENSG00000198028; CTA
FEGTDYGK

SEQ ID NO: 101549 - protein, 10 aa, Homo sapiens
  Table A; Target 101549; HLA-B*07:02; ZNF560; ENSG00000198028; CTA
FEGTDYGKAF

SEQ ID NO: 101550 - protein, 10 aa, Homo sapiens
  Table A; Target 101550; HLA-B*44:02; ZNF560; ENSG00000198028; CTA
FEGTDYGKAF

SEQ ID NO: 101551 - protein, 10 aa, Homo sapiens
  Table A; Target 101551; HLA-B*44:03; ZNF560; ENSG00000198028; CTA
FEGTDYGKAF

SEQ ID NO: 101552 - protein, 10 aa, Homo sapiens
  Table A; Target 101552; HLA-C*04:01; ZNF560; ENSG00000198028; CTA
FEGTDYGKAF

SEQ ID NO: 101553 - protein, 10 aa, Homo sapiens
  Table A; Target 101553; HLA-C*07:01; ZNF560; ENSG00000198028; CTA
FEGTDYGKAF

SEQ ID NO: 101554 - protein, 10 aa, Homo sapiens
  Table A; Target 101554; HLA-C*16:04; ZNF560; ENSG00000198028; CTA
FEGTDYGKAF

SEQ ID NO: 101555 - protein, 11 aa, Homo sapiens
  Table A; Target 101555; HLA-A*68:01; ZNF560; ENSG00000198028; CTA
FGTSSGVIEDR

SEQ ID NO: 101556 - protein, 11 aa, Homo sapiens
  Table A; Target 101556; HLA-B*27:02; ZNF560; ENSG00000198028; CTA
FGTSSGVIEDR

SEQ ID NO: 101557 - protein, 11 aa, Homo sapiens
  Table A; Target 101557; HLA-C*07:06; ZNF560; ENSG00000198028; CTA
FGTSSGVIEDR

SEQ ID NO: 101558 - protein, 9 aa, Homo sapiens
  Table A; Target 101558; HLA-A*02:03; ZNF560; ENSG00000198028; CTA
FIYQSYLEA

SEQ ID NO: 101559 - protein, 9 aa, Homo sapiens
  Table A; Target 101559; HLA-B*54:01; ZNF560; ENSG00000198028; CTA
FIYQSYLEA

SEQ ID NO: 101560 - protein, 9 aa, Homo sapiens
  Table A; Target 101560; HLA-A*30:01; ZNF560; ENSG00000198028; CTA
FQLFKPSVI

SEQ ID NO: 101561 - protein, 8 aa, Homo sapiens
  Table A; Target 101561; HLA-C*03:04; ZNF560; ENSG00000198028; CTA
FSARIAHL

SEQ ID NO: 101562 - protein, 8 aa, Homo sapiens
  Table A; Target 101562; HLA-C*07:04; ZNF560; ENSG00000198028; CTA
FSARIAHL

SEQ ID NO: 101563 - protein, 8 aa, Homo sapiens
  Table A; Target 101563; HLA-C*16:01; ZNF560; ENSG00000198028; CTA
FSARIAHL

SEQ ID NO: 101564 - protein, 9 aa, Homo sapiens
  Table A; Target 101564; HLA-A*31:01; ZNF560; ENSG00000198028; CTA
FSSLFAHLR

SEQ ID NO: 101565 - protein, 9 aa, Homo sapiens
  Table A; Target 101565; HLA-A*01:01; ZNF560; ENSG00000198028; CTA
FTERSDLTK

SEQ ID NO: 101566 - protein, 9 aa, Homo sapiens
  Table A; Target 101566; HLA-A*01:01; ZNF560; ENSG00000198028; CTA
FTERSYLTK

SEQ ID NO: 101567 - protein, 9 aa, Homo sapiens
  Table A; Target 101567; HLA-A*26:01; ZNF560; ENSG00000198028; CTA
FTHSTSHAV

SEQ ID NO: 101568 - protein, 9 aa, Homo sapiens
  Table A; Target 101568; HLA-A*32:01; ZNF560; ENSG00000198028; CTA
FTHSTSHAV

SEQ ID NO: 101569 - protein, 9 aa, Homo sapiens
  Table A; Target 101569; HLA-A*68:02; ZNF560; ENSG00000198028; CTA
FTHSTSHAV

SEQ ID NO: 101570 - protein, 9 aa, Homo sapiens
  Table A; Target 101570; HLA-B*13:02; ZNF560; ENSG00000198028; CTA
FTHSTSHAV

SEQ ID NO: 101571 - protein, 9 aa, Homo sapiens
  Table A; Target 101571; HLA-B*40:02; ZNF560; ENSG00000198028; CTA
FTHSTSHAV

SEQ ID NO: 101572 - protein, 9 aa, Homo sapiens
  Table A; Target 101572; HLA-B*46:01; ZNF560; ENSG00000198028; CTA
FTHSTSHAV

SEQ ID NO: 101573 - protein, 9 aa, Homo sapiens
  Table A; Target 101573; HLA-C*02:02; ZNF560; ENSG00000198028; CTA
FTHSTSHAV

SEQ ID NO: 101574 - protein, 9 aa, Homo sapiens
  Table A; Target 101574; HLA-C*03:03; ZNF560; ENSG00000198028; CTA
FTHSTSHAV

SEQ ID NO: 101575 - protein, 9 aa, Homo sapiens
  Table A; Target 101575; HLA-C*03:04; ZNF560; ENSG00000198028; CTA
FTHSTSHAV

SEQ ID NO: 101576 - protein, 9 aa, Homo sapiens
  Table A; Target 101576; HLA-B*13:02; ZNF560; ENSG00000198028; CTA
FTSSACLRI

SEQ ID NO: 101577 - protein, 8 aa, Homo sapiens
  Table A; Target 101577; HLA-C*03:04; ZNF560; ENSG00000198028; CTA
FTVPSGFL

SEQ ID NO: 101578 - protein, 11 aa, Homo sapiens
  Table A; Target 101578; HLA-A*02:07; ZNF560; ENSG00000198028; CTA
FVVSSSLVDHL

SEQ ID NO: 101579 - protein, 11 aa, Homo sapiens
  Table A; Target 101579; HLA-A*23:01; ZNF560; ENSG00000198028; CTA
FVVSSSLVDHL

SEQ ID NO: 101580 - protein, 11 aa, Homo sapiens
  Table A; Target 101580; HLA-A*68:02; ZNF560; ENSG00000198028; CTA
FVVSSSLVDHL

SEQ ID NO: 101581 - protein, 11 aa, Homo sapiens
  Table A; Target 101581; HLA-B*27:05; ZNF560; ENSG00000198028; CTA
FVVSSSLVDHL

SEQ ID NO: 101582 - protein, 11 aa, Homo sapiens
  Table A; Target 101582; HLA-B*38:01; ZNF560; ENSG00000198028; CTA
FVVSSSLVDHL

SEQ ID NO: 101583 - protein, 9 aa, Homo sapiens
  Table A; Target 101583; HLA-B*49:01; ZNF560; ENSG00000198028; CTA
GEAFTHSTS

SEQ ID NO: 101584 - protein, 9 aa, Homo sapiens
  Table A; Target 101584; HLA-C*07:04; ZNF560; ENSG00000198028; CTA
GEAFTHSTS

SEQ ID NO: 101585 - protein, 8 aa, Homo sapiens
  Table A; Target 101585; HLA-B*18:01; ZNF560; ENSG00000198028; CTA
GEKPFKCY

SEQ ID NO: 101586 - protein, 10 aa, Homo sapiens
  Table A; Target 101586; HLA-B*44:02; ZNF560; ENSG00000198028; CTA
GEKPYEHKEY

SEQ ID NO: 101587 - protein, 10 aa, Homo sapiens
  Table A; Target 101587; HLA-B*44:03; ZNF560; ENSG00000198028; CTA
GEKPYEHKEY

SEQ ID NO: 101588 - protein, 9 aa, Homo sapiens
  Table A; Target 101588; HLA-B*15:01; ZNF560; ENSG00000198028; CTA
GIQMDLVTF

SEQ ID NO: 101589 - protein, 9 aa, Homo sapiens
  Table A; Target 101589; HLA-B*15:03; ZNF560; ENSG00000198028; CTA
GKAFASFSA

SEQ ID NO: 101590 - protein, 8 aa, Homo sapiens
  Table A; Target 101590; HLA-B*15:03; ZNF560; ENSG00000198028; CTA
GKAFGTSA

SEQ ID NO: 101591 - protein, 10 aa, Homo sapiens
  Table A; Target 101591; HLA-B*15:03; ZNF560; ENSG00000198028; CTA
GKAFGTSAGL

SEQ ID NO: 101592 - protein, 9 aa, Homo sapiens
  Table A; Target 101592; HLA-A*29:02; ZNF560; ENSG00000198028; CTA
GKAFIYQSY

SEQ ID NO: 101593 - protein, 9 aa, Homo sapiens
  Table A; Target 101593; HLA-B*15:03; ZNF560; ENSG00000198028; CTA
GKAFIYQSY

SEQ ID NO: 101594 - protein, 9 aa, Homo sapiens
  Table A; Target 101594; HLA-B*15:03; ZNF560; ENSG00000198028; CTA
GKAFTERSY

SEQ ID NO: 101595 - protein, 9 aa, Homo sapiens
  Table A; Target 101595; HLA-B*15:03; ZNF560; ENSG00000198028; CTA
GKAFTKCSY

SEQ ID NO: 101596 - protein, 10 aa, Homo sapiens
  Table A; Target 101596; HLA-B*15:03; ZNF560; ENSG00000198028; CTA
GKAFVVSSSL

SEQ ID NO: 101597 - protein, 9 aa, Homo sapiens
  Table A; Target 101597; HLA-B*15:03; ZNF560; ENSG00000198028; CTA
GKTFTVPSG

SEQ ID NO: 101598 - protein, 10 aa, Homo sapiens
  Table A; Target 101598; HLA-B*15:03; ZNF560; ENSG00000198028; CTA
GKTFTVPSGF

SEQ ID NO: 101599 - protein, 9 aa, Homo sapiens
  Table A; Target 101599; HLA-A*29:02; ZNF560; ENSG00000198028; CTA
GNTSECIQY

SEQ ID NO: 101600 - protein, 9 aa, Homo sapiens
  Table A; Target 101600; HLA-A*30:02; ZNF560; ENSG00000198028; CTA
GNTSECIQY

SEQ ID NO: 101601 - protein, 9 aa, Homo sapiens
  Table A; Target 101601; HLA-B*15:03; ZNF560; ENSG00000198028; CTA
GNTSECIQY

SEQ ID NO: 101602 - protein, 9 aa, Homo sapiens
  Table A; Target 101602; HLA-B*39:01; ZNF560; ENSG00000198028; CTA
GNTSECIQY

SEQ ID NO: 101603 - protein, 9 aa, Homo sapiens
  Table A; Target 101603; HLA-C*07:01; ZNF560; ENSG00000198028; CTA
GNTSECIQY

SEQ ID NO: 101604 - protein, 9 aa, Homo sapiens
  Table A; Target 101604; HLA-A*01:01; ZNF560; ENSG00000198028; CTA
GTDYGKAFI

SEQ ID NO: 101605 - protein, 10 aa, Homo sapiens
  Table A; Target 101605; HLA-A*01:01; ZNF560; ENSG00000198028; CTA
GTDYGKAFIY

SEQ ID NO: 101606 - protein, 10 aa, Homo sapiens
  Table A; Target 101606; HLA-A*11:01; ZNF560; ENSG00000198028; CTA
GTDYGKAFIY

SEQ ID NO: 101607 - protein, 10 aa, Homo sapiens
  Table A; Target 101607; HLA-A*29:02; ZNF560; ENSG00000198028; CTA
GTDYGKAFIY

SEQ ID NO: 101608 - protein, 10 aa, Homo sapiens
  Table A; Target 101608; HLA-A*30:02; ZNF560; ENSG00000198028; CTA
GTDYGKAFIY

SEQ ID NO: 101609 - protein, 10 aa, Homo sapiens
  Table A; Target 101609; HLA-C*07:01; ZNF560; ENSG00000198028; CTA
GTDYGKAFIY

SEQ ID NO: 101610 - protein, 9 aa, Homo sapiens
  Table A; Target 101610; HLA-A*03:01; ZNF560; ENSG00000198028; CTA
GTSAGLIEH

SEQ ID NO: 101611 - protein, 9 aa, Homo sapiens
  Table A; Target 101611; HLA-A*03:02; ZNF560; ENSG00000198028; CTA
GTSAGLIEH

SEQ ID NO: 101612 - protein, 9 aa, Homo sapiens
  Table A; Target 101612; HLA-A*11:01; ZNF560; ENSG00000198028; CTA
GTSAGLIEH

SEQ ID NO: 101613 - protein, 10 aa, Homo sapiens
  Table A; Target 101613; HLA-A*68:02; ZNF560; ENSG00000198028; CTA
GTSAGLIEHI

SEQ ID NO: 101614 - protein, 10 aa, Homo sapiens
  Table A; Target 101614; HLA-B*58:01; ZNF560; ENSG00000198028; CTA
GTSAGLIEHI

SEQ ID NO: 101615 - protein, 10 aa, Homo sapiens
  Table A; Target 101615; HLA-A*03:02; ZNF560; ENSG00000198028; CTA
GTSSGVIEDR

SEQ ID NO: 101616 - protein, 10 aa, Homo sapiens
  Table A; Target 101616; HLA-A*11:01; ZNF560; ENSG00000198028; CTA
GTSSGVIEDR

SEQ ID NO: 101617 - protein, 10 aa, Homo sapiens
  Table A; Target 101617; HLA-A*31:01; ZNF560; ENSG00000198028; CTA
GTSSGVIEDR

SEQ ID NO: 101618 - protein, 10 aa, Homo sapiens
  Table A; Target 101618; HLA-A*68:01; ZNF560; ENSG00000198028; CTA
GTSSGVIEDR

SEQ ID NO: 101619 - protein, 10 aa, Homo sapiens
  Table A; Target 101619; HLA-B*27:02; ZNF560; ENSG00000198028; CTA
GTSSGVIEDR

SEQ ID NO: 101620 - protein, 10 aa, Homo sapiens
  Table A; Target 101620; HLA-C*07:06; ZNF560; ENSG00000198028; CTA
GTSSGVIEDR

SEQ ID NO: 101621 - protein, 11 aa, Homo sapiens
  Table A; Target 101621; HLA-C*07:06; ZNF560; ENSG00000198028; CTA
GTSSGVIEDRR

SEQ ID NO: 101622 - protein, 9 aa, Homo sapiens
  Table A; Target 101622; HLA-B*35:03; ZNF560; ENSG00000198028; CTA
HAAEKTSEC

SEQ ID NO: 101623 - protein, 9 aa, Homo sapiens
  Table A; Target 101623; HLA-B*54:01; ZNF560; ENSG00000198028; CTA
HAAEKTSEC

SEQ ID NO: 101624 - protein, 9 aa, Homo sapiens
  Table A; Target 101624; HLA-B*55:01; ZNF560; ENSG00000198028; CTA
HAAEKTSEC

SEQ ID NO: 101625 - protein, 9 aa, Homo sapiens
  Table A; Target 101625; HLA-C*03:03; ZNF560; ENSG00000198028; CTA
HAAEKTSEC

SEQ ID NO: 101626 - protein, 9 aa, Homo sapiens
  Table A; Target 101626; HLA-C*03:04; ZNF560; ENSG00000198028; CTA
HAAEKTSEC

SEQ ID NO: 101627 - protein, 9 aa, Homo sapiens
  Table A; Target 101627; HLA-C*12:03; ZNF560; ENSG00000198028; CTA
HAAEKTSEC

SEQ ID NO: 101628 - protein, 9 aa, Homo sapiens
  Table A; Target 101628; HLA-C*16:02; ZNF560; ENSG00000198028; CTA
HAAEKTSEC

SEQ ID NO: 101629 - protein, 9 aa, Homo sapiens
  Table A; Target 101629; HLA-B*54:01; ZNF560; ENSG00000198028; CTA
HAGEKPYEC

SEQ ID NO: 101630 - protein, 8 aa, Homo sapiens
  Table A; Target 101630; HLA-B*35:01; ZNF560; ENSG00000198028; CTA
HAVNVETH

SEQ ID NO: 101631 - protein, 9 aa, Homo sapiens
  Table A; Target 101631; HLA-A*23:01; ZNF560; ENSG00000198028; CTA
HAVNVETHI

SEQ ID NO: 101632 - protein, 9 aa, Homo sapiens
  Table A; Target 101632; HLA-A*68:02; ZNF560; ENSG00000198028; CTA
HAVNVETHI

SEQ ID NO: 101633 - protein, 9 aa, Homo sapiens
  Table A; Target 101633; HLA-B*13:02; ZNF560; ENSG00000198028; CTA
HAVNVETHI

SEQ ID NO: 101634 - protein, 9 aa, Homo sapiens
  Table A; Target 101634; HLA-B*35:03; ZNF560; ENSG00000198028; CTA
HAVNVETHI

SEQ ID NO: 101635 - protein, 9 aa, Homo sapiens
  Table A; Target 101635; HLA-B*38:01; ZNF560; ENSG00000198028; CTA
HAVNVETHI

SEQ ID NO: 101636 - protein, 9 aa, Homo sapiens
  Table A; Target 101636; HLA-B*39:01; ZNF560; ENSG00000198028; CTA
HAVNVETHI

SEQ ID NO: 101637 - protein, 9 aa, Homo sapiens
  Table A; Target 101637; HLA-B*51:01; ZNF560; ENSG00000198028; CTA
HAVNVETHI

SEQ ID NO: 101638 - protein, 9 aa, Homo sapiens
  Table A; Target 101638; HLA-B*58:01; ZNF560; ENSG00000198028; CTA
HAVNVETHI

SEQ ID NO: 101639 - protein, 9 aa, Homo sapiens
  Table A; Target 101639; HLA-C*02:02; ZNF560; ENSG00000198028; CTA
HAVNVETHI

SEQ ID NO: 101640 - protein, 9 aa, Homo sapiens
  Table A; Target 101640; HLA-C*03:03; ZNF560; ENSG00000198028; CTA
HAVNVETHI

SEQ ID NO: 101641 - protein, 9 aa, Homo sapiens
  Table A; Target 101641; HLA-C*16:02; ZNF560; ENSG00000198028; CTA
HAVNVETHI

SEQ ID NO: 101642 - protein, 9 aa, Homo sapiens
  Table A; Target 101642; HLA-C*16:04; ZNF560; ENSG00000198028; CTA
HAVNVETHI

SEQ ID NO: 101643 - protein, 10 aa, Homo sapiens
  Table A; Target 101643; HLA-B*38:01; ZNF560; ENSG00000198028; CTA
HAVNVETHII

SEQ ID NO: 101644 - protein, 11 aa, Homo sapiens
  Table A; Target 101644; HLA-A*68:01; ZNF560; ENSG00000198028; CTA
HAVNVETHIIK

SEQ ID NO: 101645 - protein, 9 aa, Homo sapiens
  Table A; Target 101645; HLA-A*03:01; ZNF560; ENSG00000198028; CTA
HLKTHAAEK

SEQ ID NO: 101646 - protein, 9 aa, Homo sapiens
  Table A; Target 101646; HLA-A*33:01; ZNF560; ENSG00000198028; CTA
HLKTHAAEK

SEQ ID NO: 101647 - protein, 8 aa, Homo sapiens
  Table A; Target 101647; HLA-B*08:01; ZNF560; ENSG00000198028; CTA
HMQTHIGI

SEQ ID NO: 101648 - protein, 9 aa, Homo sapiens
  Table A; Target 101648; HLA-A*03:01; ZNF560; ENSG00000198028; CTA
HMQTHIGIK

SEQ ID NO: 101649 - protein, 9 aa, Homo sapiens
  Table A; Target 101649; HLA-A*03:02; ZNF560; ENSG00000198028; CTA
HMQTHIGIK

SEQ ID NO: 101650 - protein, 9 aa, Homo sapiens
  Table A; Target 101650; HLA-A*33:01; ZNF560; ENSG00000198028; CTA
HMRTHTEER

SEQ ID NO: 101651 - protein, 8 aa, Homo sapiens
  Table A; Target 101651; HLA-B*08:01; ZNF560; ENSG00000198028; CTA
HPCLKTNM

SEQ ID NO: 101652 - protein, 8 aa, Homo sapiens
  Table A; Target 101652; HLA-A*30:01; ZNF560; ENSG00000198028; CTA
HQTSVSAL

SEQ ID NO: 101653 - protein, 8 aa, Homo sapiens
  Table A; Target 101653; HLA-B*13:02; ZNF560; ENSG00000198028; CTA
HQTSVSAL

SEQ ID NO: 101654 - protein, 8 aa, Homo sapiens
  Table A; Target 101654; HLA-B*15:01; ZNF560; ENSG00000198028; CTA
HQTSVSAL

SEQ ID NO: 101655 - protein, 8 aa, Homo sapiens
  Table A; Target 101655; HLA-B*15:03; ZNF560; ENSG00000198028; CTA
HQTSVSAL

SEQ ID NO: 101656 - protein, 8 aa, Homo sapiens
  Table A; Target 101656; HLA-B*37:01; ZNF560; ENSG00000198028; CTA
HQTSVSAL

SEQ ID NO: 101657 - protein, 8 aa, Homo sapiens
  Table A; Target 101657; HLA-B*39:01; ZNF560; ENSG00000198028; CTA
HQTSVSAL

SEQ ID NO: 101658 - protein, 8 aa, Homo sapiens
  Table A; Target 101658; HLA-B*40:01; ZNF560; ENSG00000198028; CTA
HQTSVSAL

SEQ ID NO: 101659 - protein, 8 aa, Homo sapiens
  Table A; Target 101659; HLA-C*07:04; ZNF560; ENSG00000198028; CTA
HQTSVSAL

SEQ ID NO: 101660 - protein, 8 aa, Homo sapiens
  Table A; Target 101660; HLA-A*01:01; ZNF560; ENSG00000198028; CTA
HSDLTNHV

SEQ ID NO: 101661 - protein, 8 aa, Homo sapiens
  Table A; Target 101661; HLA-C*05:01; ZNF560; ENSG00000198028; CTA
HSDLTNHV

SEQ ID NO: 101662 - protein, 8 aa, Homo sapiens
  Table A; Target 101662; HLA-C*16:02; ZNF560; ENSG00000198028; CTA
HSDLTNHV

SEQ ID NO: 101663 - protein, 9 aa, Homo sapiens
  Table A; Target 101663; HLA-A*01:01; ZNF560; ENSG00000198028; CTA
HSDLTNHVR

SEQ ID NO: 101664 - protein, 9 aa, Homo sapiens
  Table A; Target 101664; HLA-A*33:01; ZNF560; ENSG00000198028; CTA
HSDLTNHVR

SEQ ID NO: 101665 - protein, 9 aa, Homo sapiens
  Table A; Target 101665; HLA-A*33:03; ZNF560; ENSG00000198028; CTA
HSDLTNHVR

SEQ ID NO: 101666 - protein, 9 aa, Homo sapiens
  Table A; Target 101666; HLA-A*68:01; ZNF560; ENSG00000198028; CTA
HSDLTNHVR

SEQ ID NO: 101667 - protein, 9 aa, Homo sapiens
  Table A; Target 101667; HLA-C*07:06; ZNF560; ENSG00000198028; CTA
HSDLTNHVR

SEQ ID NO: 101668 - protein, 9 aa, Homo sapiens
  Table A; Target 101668; HLA-A*68:01; ZNF560; ENSG00000198028; CTA
HSTSHAVNV

SEQ ID NO: 101669 - protein, 9 aa, Homo sapiens
  Table A; Target 101669; HLA-A*68:02; ZNF560; ENSG00000198028; CTA
HSTSHAVNV

SEQ ID NO: 101670 - protein, 9 aa, Homo sapiens
  Table A; Target 101670; HLA-B*13:02; ZNF560; ENSG00000198028; CTA
HSTSHAVNV

SEQ ID NO: 101671 - protein, 9 aa, Homo sapiens
  Table A; Target 101671; HLA-C*02:02; ZNF560; ENSG00000198028; CTA
HSTSHAVNV

SEQ ID NO: 101672 - protein, 9 aa, Homo sapiens
  Table A; Target 101672; HLA-C*16:02; ZNF560; ENSG00000198028; CTA
HSTSHAVNV

SEQ ID NO: 101673 - protein, 9 aa, Homo sapiens
  Table A; Target 101673; HLA-A*01:01; ZNF560; ENSG00000198028; CTA
HTGDKPYEY

SEQ ID NO: 101674 - protein, 9 aa, Homo sapiens
  Table A; Target 101674; HLA-A*11:01; ZNF560; ENSG00000198028; CTA
HTGDKPYEY

SEQ ID NO: 101675 - protein, 9 aa, Homo sapiens
  Table A; Target 101675; HLA-A*25:01; ZNF560; ENSG00000198028; CTA
HTGDKPYEY

SEQ ID NO: 101676 - protein, 9 aa, Homo sapiens
  Table A; Target 101676; HLA-A*26:01; ZNF560; ENSG00000198028; CTA
HTGDKPYEY

SEQ ID NO: 101677 - protein, 9 aa, Homo sapiens
  Table A; Target 101677; HLA-A*29:02; ZNF560; ENSG00000198028; CTA
HTGDKPYEY

SEQ ID NO: 101678 - protein, 9 aa, Homo sapiens
  Table A; Target 101678; HLA-A*30:02; ZNF560; ENSG00000198028; CTA
HTGDKPYEY

SEQ ID NO: 101679 - protein, 9 aa, Homo sapiens
  Table A; Target 101679; HLA-A*32:01; ZNF560; ENSG00000198028; CTA
HTGDKPYEY

SEQ ID NO: 101680 - protein, 9 aa, Homo sapiens
  Table A; Target 101680; HLA-A*33:01; ZNF560; ENSG00000198028; CTA
HTGDKPYEY

SEQ ID NO: 101681 - protein, 9 aa, Homo sapiens
  Table A; Target 101681; HLA-A*33:03; ZNF560; ENSG00000198028; CTA
HTGDKPYEY

SEQ ID NO: 101682 - protein, 9 aa, Homo sapiens
  Table A; Target 101682; HLA-A*68:01; ZNF560; ENSG00000198028; CTA
HTGDKPYEY

SEQ ID NO: 101683 - protein, 9 aa, Homo sapiens
  Table A; Target 101683; HLA-B*35:01; ZNF560; ENSG00000198028; CTA
HTGDKPYEY

SEQ ID NO: 101684 - protein, 9 aa, Homo sapiens
  Table A; Target 101684; HLA-B*46:01; ZNF560; ENSG00000198028; CTA
HTGDKPYEY

SEQ ID NO: 101685 - protein, 9 aa, Homo sapiens
  Table A; Target 101685; HLA-B*57:01; ZNF560; ENSG00000198028; CTA
HTGDKPYEY

SEQ ID NO: 101686 - protein, 9 aa, Homo sapiens
  Table A; Target 101686; HLA-B*58:01; ZNF560; ENSG00000198028; CTA
HTGDKPYEY

SEQ ID NO: 101687 - protein, 9 aa, Homo sapiens
  Table A; Target 101687; HLA-C*02:02; ZNF560; ENSG00000198028; CTA
HTGDKPYEY

SEQ ID NO: 101688 - protein, 9 aa, Homo sapiens
  Table A; Target 101688; HLA-C*07:01; ZNF560; ENSG00000198028; CTA
HTGDKPYEY

SEQ ID NO: 101689 - protein, 9 aa, Homo sapiens
  Table A; Target 101689; HLA-C*07:04; ZNF560; ENSG00000198028; CTA
HTGDKPYEY

SEQ ID NO: 101690 - protein, 9 aa, Homo sapiens
  Table A; Target 101690; HLA-C*07:06; ZNF560; ENSG00000198028; CTA
HTGDKPYEY

SEQ ID NO: 101691 - protein, 9 aa, Homo sapiens
  Table A; Target 101691; HLA-C*12:03; ZNF560; ENSG00000198028; CTA
HTGDKPYEY

SEQ ID NO: 101692 - protein, 9 aa, Homo sapiens
  Table A; Target 101692; HLA-C*16:01; ZNF560; ENSG00000198028; CTA
HTGDKPYEY

SEQ ID NO: 101693 - protein, 9 aa, Homo sapiens
  Table A; Target 101693; HLA-C*16:02; ZNF560; ENSG00000198028; CTA
HTGDKPYEY

SEQ ID NO: 101694 - protein, 9 aa, Homo sapiens
  Table A; Target 101694; HLA-C*16:04; ZNF560; ENSG00000198028; CTA
HTGDKPYEY

SEQ ID NO: 101695 - protein, 10 aa, Homo sapiens
  Table A; Target 101695; HLA-A*03:01; ZNF560; ENSG00000198028; CTA
HTGDKPYEYK

SEQ ID NO: 101696 - protein, 10 aa, Homo sapiens
  Table A; Target 101696; HLA-A*03:02; ZNF560; ENSG00000198028; CTA
HTGDKPYEYK

SEQ ID NO: 101697 - protein, 10 aa, Homo sapiens
  Table A; Target 101697; HLA-A*11:01; ZNF560; ENSG00000198028; CTA
HTGDKPYEYK

SEQ ID NO: 101698 - protein, 10 aa, Homo sapiens
  Table A; Target 101698; HLA-A*33:01; ZNF560; ENSG00000198028; CTA
HTGDKPYEYK

SEQ ID NO: 101699 - protein, 9 aa, Homo sapiens
  Table A; Target 101699; HLA-A*03:01; ZNF560; ENSG00000198028; CTA
IIKNPYECK

SEQ ID NO: 101700 - protein, 8 aa, Homo sapiens
  Table A; Target 101700; HLA-A*31:01; ZNF560; ENSG00000198028; CTA
ILLDPVQR

SEQ ID NO: 101701 - protein, 8 aa, Homo sapiens
  Table A; Target 101701; HLA-A*33:03; ZNF560; ENSG00000198028; CTA
ILLDPVQR

SEQ ID NO: 101702 - protein, 8 aa, Homo sapiens
  Table A; Target 101702; HLA-C*07:06; ZNF560; ENSG00000198028; CTA
ILLDPVQR

SEQ ID NO: 101703 - protein, 10 aa, Homo sapiens
  Table A; Target 101703; HLA-A*02:01; ZNF560; ENSG00000198028; CTA
ILLDPVQRNL

SEQ ID NO: 101704 - protein, 10 aa, Homo sapiens
  Table A; Target 101704; HLA-A*02:03; ZNF560; ENSG00000198028; CTA
ILLDPVQRNL

SEQ ID NO: 101705 - protein, 10 aa, Homo sapiens
  Table A; Target 101705; HLA-A*02:04; ZNF560; ENSG00000198028; CTA
ILLDPVQRNL

SEQ ID NO: 101706 - protein, 10 aa, Homo sapiens
  Table A; Target 101706; HLA-A*02:07; ZNF560; ENSG00000198028; CTA
ILLDPVQRNL

SEQ ID NO: 101707 - protein, 10 aa, Homo sapiens
  Table A; Target 101707; HLA-A*03:01; ZNF560; ENSG00000198028; CTA
ILLDPVQRNL

SEQ ID NO: 101708 - protein, 11 aa, Homo sapiens
  Table A; Target 101708; HLA-A*01:01; ZNF560; ENSG00000198028; CTA
ILLDPVQRNLY

SEQ ID NO: 101709 - protein, 11 aa, Homo sapiens
  Table A; Target 101709; HLA-A*03:01; ZNF560; ENSG00000198028; CTA
ILLDPVQRNLY

SEQ ID NO: 101710 - protein, 11 aa, Homo sapiens
  Table A; Target 101710; HLA-A*23:01; ZNF560; ENSG00000198028; CTA
ILLDPVQRNLY

SEQ ID NO: 101711 - protein, 11 aa, Homo sapiens
  Table A; Target 101711; HLA-A*29:02; ZNF560; ENSG00000198028; CTA
ILLDPVQRNLY

SEQ ID NO: 101712 - protein, 11 aa, Homo sapiens
  Table A; Target 101712; HLA-A*30:02; ZNF560; ENSG00000198028; CTA
ILLDPVQRNLY

SEQ ID NO: 101713 - protein, 11 aa, Homo sapiens
  Table A; Target 101713; HLA-A*32:01; ZNF560; ENSG00000198028; CTA
ILLDPVQRNLY

SEQ ID NO: 101714 - protein, 11 aa, Homo sapiens
  Table A; Target 101714; HLA-B*57:01; ZNF560; ENSG00000198028; CTA
ILLDPVQRNLY

SEQ ID NO: 101715 - protein, 11 aa, Homo sapiens
  Table A; Target 101715; HLA-C*02:02; ZNF560; ENSG00000198028; CTA
ILLDPVQRNLY

SEQ ID NO: 101716 - protein, 11 aa, Homo sapiens
  Table A; Target 101716; HLA-C*16:01; ZNF560; ENSG00000198028; CTA
ILLDPVQRNLY

SEQ ID NO: 101717 - protein, 8 aa, Homo sapiens
  Table A; Target 101717; HLA-A*31:01; ZNF560; ENSG00000198028; CTA
ILNVQVQR

SEQ ID NO: 101718 - protein, 8 aa, Homo sapiens
  Table A; Target 101718; HLA-A*33:01; ZNF560; ENSG00000198028; CTA
ILNVQVQR

SEQ ID NO: 101719 - protein, 8 aa, Homo sapiens
  Table A; Target 101719; HLA-A*33:03; ZNF560; ENSG00000198028; CTA
ILNVQVQR

SEQ ID NO: 101720 - protein, 9 aa, Homo sapiens
  Table A; Target 101720; HLA-A*03:01; ZNF560; ENSG00000198028; CTA
ILNVQVQRK

SEQ ID NO: 101721 - protein, 9 aa, Homo sapiens
  Table A; Target 101721; HLA-A*03:02; ZNF560; ENSG00000198028; CTA
ILNVQVQRK

SEQ ID NO: 101722 - protein, 9 aa, Homo sapiens
  Table A; Target 101722; HLA-A*11:01; ZNF560; ENSG00000198028; CTA
ILNVQVQRK

SEQ ID NO: 101723 - protein, 8 aa, Homo sapiens
  Table A; Target 101723; HLA-A*23:01; ZNF560; ENSG00000198028; CTA
IQMDLVTF

SEQ ID NO: 101724 - protein, 8 aa, Homo sapiens
  Table A; Target 101724; HLA-B*15:01; ZNF560; ENSG00000198028; CTA
IQMDLVTF

SEQ ID NO: 101725 - protein, 8 aa, Homo sapiens
  Table A; Target 101725; HLA-B*15:03; ZNF560; ENSG00000198028; CTA
IQMDLVTF

SEQ ID NO: 101726 - protein, 8 aa, Homo sapiens
  Table A; Target 101726; HLA-B*37:01; ZNF560; ENSG00000198028; CTA
IQMDLVTF

SEQ ID NO: 101727 - protein, 11 aa, Homo sapiens
  Table A; Target 101727; HLA-A*02:01; ZNF560; ENSG00000198028; CTA
IQMDLVTFDSV

SEQ ID NO: 101728 - protein, 11 aa, Homo sapiens
  Table A; Target 101728; HLA-A*02:07; ZNF560; ENSG00000198028; CTA
IQMDLVTFDSV

SEQ ID NO: 101729 - protein, 11 aa, Homo sapiens
  Table A; Target 101729; HLA-B*13:02; ZNF560; ENSG00000198028; CTA
IQMDLVTFDSV

SEQ ID NO: 101730 - protein, 11 aa, Homo sapiens
  Table A; Target 101730; HLA-C*16:04; ZNF560; ENSG00000198028; CTA
IQMDLVTFDSV

SEQ ID NO: 101731 - protein, 9 aa, Homo sapiens
  Table A; Target 101731; HLA-B*13:02; ZNF560; ENSG00000198028; CTA
IQTSNGIQM

SEQ ID NO: 101732 - protein, 9 aa, Homo sapiens
  Table A; Target 101732; HLA-B*15:01; ZNF560; ENSG00000198028; CTA
IQTSNGIQM

SEQ ID NO: 101733 - protein, 9 aa, Homo sapiens
  Table A; Target 101733; HLA-B*15:03; ZNF560; ENSG00000198028; CTA
IQTSNGIQM

SEQ ID NO: 101734 - protein, 9 aa, Homo sapiens
  Table A; Target 101734; HLA-B*27:05; ZNF560; ENSG00000198028; CTA
IQTSNGIQM

SEQ ID NO: 101735 - protein, 9 aa, Homo sapiens
  Table A; Target 101735; HLA-B*39:01; ZNF560; ENSG00000198028; CTA
IQTSNGIQM

SEQ ID NO: 101736 - protein, 9 aa, Homo sapiens
  Table A; Target 101736; HLA-C*02:02; ZNF560; ENSG00000198028; CTA
IQTSNGIQM

SEQ ID NO: 101737 - protein, 9 aa, Homo sapiens
  Table A; Target 101737; HLA-C*07:04; ZNF560; ENSG00000198028; CTA
IQTSNGIQM

SEQ ID NO: 101738 - protein, 8 aa, Homo sapiens
  Table A; Target 101738; HLA-B*08:01; ZNF560; ENSG00000198028; CTA
IQYAKDLL

SEQ ID NO: 101739 - protein, 8 aa, Homo sapiens
  Table A; Target 101739; HLA-B*13:02; ZNF560; ENSG00000198028; CTA
IQYAKDLL

SEQ ID NO: 101740 - protein, 8 aa, Homo sapiens
  Table A; Target 101740; HLA-B*15:03; ZNF560; ENSG00000198028; CTA
IQYAKDLL

SEQ ID NO: 101741 - protein, 11 aa, Homo sapiens
  Table A; Target 101741; HLA-A*30:02; ZNF560; ENSG00000198028; CTA
IQYAKDLLSLY

SEQ ID NO: 101742 - protein, 11 aa, Homo sapiens
  Table A; Target 101742; HLA-B*15:01; ZNF560; ENSG00000198028; CTA
IQYAKDLLSLY

SEQ ID NO: 101743 - protein, 10 aa, Homo sapiens
  Table A; Target 101743; HLA-B*57:01; ZNF560; ENSG00000198028; CTA
ISYPSLFGHL

SEQ ID NO: 101744 - protein, 11 aa, Homo sapiens
  Table A; Target 101744; HLA-A*31:01; ZNF560; ENSG00000198028; CTA
ISYPSLFGHLR

SEQ ID NO: 101745 - protein, 11 aa, Homo sapiens
  Table A; Target 101745; HLA-B*57:01; ZNF560; ENSG00000198028; CTA
ISYPSLFGHLR

SEQ ID NO: 101746 - protein, 8 aa, Homo sapiens
  Table A; Target 101746; HLA-C*14:02; ZNF560; ENSG00000198028; CTA
IYQSYLEA

SEQ ID NO: 101747 - protein, 9 aa, Homo sapiens
  Table A; Target 101747; HLA-C*14:02; ZNF560; ENSG00000198028; CTA
IYQSYLEAH

SEQ ID NO: 101748 - protein, 10 aa, Homo sapiens
  Table A; Target 101748; HLA-A*31:01; ZNF560; ENSG00000198028; CTA
IYQSYLEAHR

SEQ ID NO: 101749 - protein, 10 aa, Homo sapiens
  Table A; Target 101749; HLA-A*33:01; ZNF560; ENSG00000198028; CTA
IYQSYLEAHR

SEQ ID NO: 101750 - protein, 10 aa, Homo sapiens
  Table A; Target 101750; HLA-A*33:03; ZNF560; ENSG00000198028; CTA
IYQSYLEAHR

SEQ ID NO: 101751 - protein, 8 aa, Homo sapiens
  Table A; Target 101751; HLA-A*32:01; ZNF560; ENSG00000198028; CTA
KAFASFSA

SEQ ID NO: 101752 - protein, 8 aa, Homo sapiens
  Table A; Target 101752; HLA-B*54:01; ZNF560; ENSG00000198028; CTA
KAFASFSA

SEQ ID NO: 101753 - protein, 8 aa, Homo sapiens
  Table A; Target 101753; HLA-B*56:01; ZNF560; ENSG00000198028; CTA
KAFASFSA

SEQ ID NO: 101754 - protein, 8 aa, Homo sapiens
  Table A; Target 101754; HLA-C*16:04; ZNF560; ENSG00000198028; CTA
KAFASFSA

SEQ ID NO: 101755 - protein, 9 aa, Homo sapiens
  Table A; Target 101755; HLA-A*03:01; ZNF560; ENSG00000198028; CTA
KAFASFSAR

SEQ ID NO: 101756 - protein, 9 aa, Homo sapiens
  Table A; Target 101756; HLA-A*30:02; ZNF560; ENSG00000198028; CTA
KAFASFSAR

SEQ ID NO: 101757 - protein, 9 aa, Homo sapiens
  Table A; Target 101757; HLA-A*31:01; ZNF560; ENSG00000198028; CTA
KAFASFSAR

SEQ ID NO: 101758 - protein, 9 aa, Homo sapiens
  Table A; Target 101758; HLA-A*33:01; ZNF560; ENSG00000198028; CTA
KAFASFSAR

SEQ ID NO: 101759 - protein, 9 aa, Homo sapiens
  Table A; Target 101759; HLA-A*33:03; ZNF560; ENSG00000198028; CTA
KAFASFSAR

SEQ ID NO: 101760 - protein, 9 aa, Homo sapiens
  Table A; Target 101760; HLA-B*46:01; ZNF560; ENSG00000198028; CTA
KAFASFSAR

SEQ ID NO: 101761 - protein, 9 aa, Homo sapiens
  Table A; Target 101761; HLA-B*57:01; ZNF560; ENSG00000198028; CTA
KAFASFSAR

SEQ ID NO: 101762 - protein, 9 aa, Homo sapiens
  Table A; Target 101762; HLA-C*02:02; ZNF560; ENSG00000198028; CTA
KAFASFSAR

SEQ ID NO: 101763 - protein, 9 aa, Homo sapiens
  Table A; Target 101763; HLA-C*07:06; ZNF560; ENSG00000198028; CTA
KAFASFSAR

SEQ ID NO: 101764 - protein, 9 aa, Homo sapiens
  Table A; Target 101764; HLA-C*16:04; ZNF560; ENSG00000198028; CTA
KAFASFSAR

SEQ ID NO: 101765 - protein, 9 aa, Homo sapiens
  Table A; Target 101765; HLA-B*07:02; ZNF560; ENSG00000198028; CTA
KAFGTSAGL

SEQ ID NO: 101766 - protein, 9 aa, Homo sapiens
  Table A; Target 101766; HLA-B*15:03; ZNF560; ENSG00000198028; CTA
KAFGTSAGL

SEQ ID NO: 101767 - protein, 9 aa, Homo sapiens
  Table A; Target 101767; HLA-B*40:01; ZNF560; ENSG00000198028; CTA
KAFGTSAGL

SEQ ID NO: 101768 - protein, 9 aa, Homo sapiens
  Table A; Target 101768; HLA-B*46:01; ZNF560; ENSG00000198028; CTA
KAFGTSAGL

SEQ ID NO: 101769 - protein, 9 aa, Homo sapiens
  Table A; Target 101769; HLA-B*58:01; ZNF560; ENSG00000198028; CTA
KAFGTSAGL

SEQ ID NO: 101770 - protein, 9 aa, Homo sapiens
  Table A; Target 101770; HLA-C*01:02; ZNF560; ENSG00000198028; CTA
KAFGTSAGL

SEQ ID NO: 101771 - protein, 9 aa, Homo sapiens
  Table A; Target 101771; HLA-C*02:02; ZNF560; ENSG00000198028; CTA
KAFGTSAGL

SEQ ID NO: 101772 - protein, 9 aa, Homo sapiens
  Table A; Target 101772; HLA-C*03:03; ZNF560; ENSG00000198028; CTA
KAFGTSAGL

SEQ ID NO: 101773 - protein, 9 aa, Homo sapiens
  Table A; Target 101773; HLA-C*03:04; ZNF560; ENSG00000198028; CTA
KAFGTSAGL

SEQ ID NO: 101774 - protein, 9 aa, Homo sapiens
  Table A; Target 101774; HLA-C*16:04; ZNF560; ENSG00000198028; CTA
KAFGTSAGL

SEQ ID NO: 101775 - protein, 9 aa, Homo sapiens
  Table A; Target 101775; HLA-A*02:03; ZNF560; ENSG00000198028; CTA
KAFGTSSGV

SEQ ID NO: 101776 - protein, 9 aa, Homo sapiens
  Table A; Target 101776; HLA-A*32:01; ZNF560; ENSG00000198028; CTA
KAFGTSSGV

SEQ ID NO: 101777 - protein, 9 aa, Homo sapiens
  Table A; Target 101777; HLA-B*13:02; ZNF560; ENSG00000198028; CTA
KAFGTSSGV

SEQ ID NO: 101778 - protein, 9 aa, Homo sapiens
  Table A; Target 101778; HLA-C*02:02; ZNF560; ENSG00000198028; CTA
KAFGTSSGV

SEQ ID NO: 101779 - protein, 9 aa, Homo sapiens
  Table A; Target 101779; HLA-C*12:03; ZNF560; ENSG00000198028; CTA
KAFGTSSGV

SEQ ID NO: 101780 - protein, 9 aa, Homo sapiens
  Table A; Target 101780; HLA-C*16:02; ZNF560; ENSG00000198028; CTA
KAFGTSSGV

SEQ ID NO: 101781 - protein, 9 aa, Homo sapiens
  Table A; Target 101781; HLA-C*16:04; ZNF560; ENSG00000198028; CTA
KAFGTSSGV

SEQ ID NO: 101782 - protein, 9 aa, Homo sapiens
  Table A; Target 101782; HLA-A*23:01; ZNF560; ENSG00000198028; CTA
KAFISYPSL

SEQ ID NO: 101783 - protein, 9 aa, Homo sapiens
  Table A; Target 101783; HLA-A*32:01; ZNF560; ENSG00000198028; CTA
KAFISYPSL

SEQ ID NO: 101784 - protein, 9 aa, Homo sapiens
  Table A; Target 101784; HLA-B*07:02; ZNF560; ENSG00000198028; CTA
KAFISYPSL

SEQ ID NO: 101785 - protein, 9 aa, Homo sapiens
  Table A; Target 101785; HLA-B*15:03; ZNF560; ENSG00000198028; CTA
KAFISYPSL

SEQ ID NO: 101786 - protein, 9 aa, Homo sapiens
  Table A; Target 101786; HLA-B*40:02; ZNF560; ENSG00000198028; CTA
KAFISYPSL

SEQ ID NO: 101787 - protein, 9 aa, Homo sapiens
  Table A; Target 101787; HLA-B*46:01; ZNF560; ENSG00000198028; CTA
KAFISYPSL

SEQ ID NO: 101788 - protein, 9 aa, Homo sapiens
  Table A; Target 101788; HLA-B*57:01; ZNF560; ENSG00000198028; CTA
KAFISYPSL

SEQ ID NO: 101789 - protein, 9 aa, Homo sapiens
  Table A; Target 101789; HLA-B*58:01; ZNF560; ENSG00000198028; CTA
KAFISYPSL

SEQ ID NO: 101790 - protein, 9 aa, Homo sapiens
  Table A; Target 101790; HLA-C*01:02; ZNF560; ENSG00000198028; CTA
KAFISYPSL

SEQ ID NO: 101791 - protein, 9 aa, Homo sapiens
  Table A; Target 101791; HLA-C*02:02; ZNF560; ENSG00000198028; CTA
KAFISYPSL

SEQ ID NO: 101792 - protein, 9 aa, Homo sapiens
  Table A; Target 101792; HLA-C*03:03; ZNF560; ENSG00000198028; CTA
KAFISYPSL

SEQ ID NO: 101793 - protein, 9 aa, Homo sapiens
  Table A; Target 101793; HLA-C*03:04; ZNF560; ENSG00000198028; CTA
KAFISYPSL

SEQ ID NO: 101794 - protein, 9 aa, Homo sapiens
  Table A; Target 101794; HLA-C*06:02; ZNF560; ENSG00000198028; CTA
KAFISYPSL

SEQ ID NO: 101795 - protein, 9 aa, Homo sapiens
  Table A; Target 101795; HLA-C*16:01; ZNF560; ENSG00000198028; CTA
KAFISYPSL

SEQ ID NO: 101796 - protein, 9 aa, Homo sapiens
  Table A; Target 101796; HLA-C*16:04; ZNF560; ENSG00000198028; CTA
KAFISYPSL

SEQ ID NO: 101797 - protein, 10 aa, Homo sapiens
  Table A; Target 101797; HLA-B*57:01; ZNF560; ENSG00000198028; CTA
KAFISYPSLF

SEQ ID NO: 101798 - protein, 8 aa, Homo sapiens
  Table A; Target 101798; HLA-A*30:02; ZNF560; ENSG00000198028; CTA
KAFIYQSY

SEQ ID NO: 101799 - protein, 8 aa, Homo sapiens
  Table A; Target 101799; HLA-A*32:01; ZNF560; ENSG00000198028; CTA
KAFIYQSY

SEQ ID NO: 101800 - protein, 8 aa, Homo sapiens
  Table A; Target 101800; HLA-B*15:01; ZNF560; ENSG00000198028; CTA
KAFIYQSY

SEQ ID NO: 101801 - protein, 8 aa, Homo sapiens
  Table A; Target 101801; HLA-B*15:03; ZNF560; ENSG00000198028; CTA
KAFIYQSY

SEQ ID NO: 101802 - protein, 8 aa, Homo sapiens
  Table A; Target 101802; HLA-B*46:01; ZNF560; ENSG00000198028; CTA
KAFIYQSY

SEQ ID NO: 101803 - protein, 8 aa, Homo sapiens
  Table A; Target 101803; HLA-B*57:01; ZNF560; ENSG00000198028; CTA
KAFIYQSY

SEQ ID NO: 101804 - protein, 8 aa, Homo sapiens
  Table A; Target 101804; HLA-C*02:02; ZNF560; ENSG00000198028; CTA
KAFIYQSY

SEQ ID NO: 101805 - protein, 8 aa, Homo sapiens
  Table A; Target 101805; HLA-C*16:01; ZNF560; ENSG00000198028; CTA
KAFIYQSY

SEQ ID NO: 101806 - protein, 8 aa, Homo sapiens
  Table A; Target 101806; HLA-C*16:04; ZNF560; ENSG00000198028; CTA
KAFIYQSY

SEQ ID NO: 101807 - protein, 9 aa, Homo sapiens
  Table A; Target 101807; HLA-A*02:04; ZNF560; ENSG00000198028; CTA
KAFIYQSYL

SEQ ID NO: 101808 - protein, 9 aa, Homo sapiens
  Table A; Target 101808; HLA-A*31:01; ZNF560; ENSG00000198028; CTA
KAFIYQSYL

SEQ ID NO: 101809 - protein, 9 aa, Homo sapiens
  Table A; Target 101809; HLA-B*57:01; ZNF560; ENSG00000198028; CTA
KAFIYQSYL

SEQ ID NO: 101810 - protein, 9 aa, Homo sapiens
  Table A; Target 101810; HLA-C*02:02; ZNF560; ENSG00000198028; CTA
KAFIYQSYL

SEQ ID NO: 101811 - protein, 9 aa, Homo sapiens
  Table A; Target 101811; HLA-A*31:01; ZNF560; ENSG00000198028; CTA
KAFRTSSGR

SEQ ID NO: 101812 - protein, 11 aa, Homo sapiens
  Table A; Target 101812; HLA-A*03:01; ZNF560; ENSG00000198028; CTA
KAFTERSDLTK

SEQ ID NO: 101813 - protein, 11 aa, Homo sapiens
  Table A; Target 101813; HLA-A*03:02; ZNF560; ENSG00000198028; CTA
KAFTERSDLTK

SEQ ID NO: 101814 - protein, 11 aa, Homo sapiens
  Table A; Target 101814; HLA-B*27:02; ZNF560; ENSG00000198028; CTA
KAFTERSDLTK

SEQ ID NO: 101815 - protein, 11 aa, Homo sapiens
  Table A; Target 101815; HLA-B*57:01; ZNF560; ENSG00000198028; CTA
KAFTERSDLTK

SEQ ID NO: 101816 - protein, 11 aa, Homo sapiens
  Table A; Target 101816; HLA-C*06:02; ZNF560; ENSG00000198028; CTA
KAFTERSDLTK

SEQ ID NO: 101817 - protein, 8 aa, Homo sapiens
  Table A; Target 101817; HLA-A*30:02; ZNF560; ENSG00000198028; CTA
KAFTERSY

SEQ ID NO: 101818 - protein, 8 aa, Homo sapiens
  Table A; Target 101818; HLA-A*32:01; ZNF560; ENSG00000198028; CTA
KAFTERSY

SEQ ID NO: 101819 - protein, 8 aa, Homo sapiens
  Table A; Target 101819; HLA-B*15:01; ZNF560; ENSG00000198028; CTA
KAFTERSY

SEQ ID NO: 101820 - protein, 8 aa, Homo sapiens
  Table A; Target 101820; HLA-B*57:01; ZNF560; ENSG00000198028; CTA
KAFTERSY

SEQ ID NO: 101821 - protein, 8 aa, Homo sapiens
  Table A; Target 101821; HLA-C*16:01; ZNF560; ENSG00000198028; CTA
KAFTERSY

SEQ ID NO: 101822 - protein, 8 aa, Homo sapiens
  Table A; Target 101822; HLA-C*16:02; ZNF560; ENSG00000198028; CTA
KAFTERSY

SEQ ID NO: 101823 - protein, 9 aa, Homo sapiens
  Table A; Target 101823; HLA-A*31:01; ZNF560; ENSG00000198028; CTA
KAFTERSYL

SEQ ID NO: 101824 - protein, 9 aa, Homo sapiens
  Table A; Target 101824; HLA-B*57:01; ZNF560; ENSG00000198028; CTA
KAFTERSYL

SEQ ID NO: 101825 - protein, 11 aa, Homo sapiens
  Table A; Target 101825; HLA-A*03:01; ZNF560; ENSG00000198028; CTA
KAFTERSYLTK

SEQ ID NO: 101826 - protein, 11 aa, Homo sapiens
  Table A; Target 101826; HLA-A*11:01; ZNF560; ENSG00000198028; CTA
KAFTERSYLTK

SEQ ID NO: 101827 - protein, 11 aa, Homo sapiens
  Table A; Target 101827; HLA-A*31:01; ZNF560; ENSG00000198028; CTA
KAFTERSYLTK

SEQ ID NO: 101828 - protein, 11 aa, Homo sapiens
  Table A; Target 101828; HLA-B*57:01; ZNF560; ENSG00000198028; CTA
KAFTERSYLTK

SEQ ID NO: 101829 - protein, 8 aa, Homo sapiens
  Table A; Target 101829; HLA-B*08:01; ZNF560; ENSG00000198028; CTA
KAFTKCSY

SEQ ID NO: 101830 - protein, 8 aa, Homo sapiens
  Table A; Target 101830; HLA-C*16:01; ZNF560; ENSG00000198028; CTA
KAFTKCSY

SEQ ID NO: 101831 - protein, 9 aa, Homo sapiens
  Table A; Target 101831; HLA-A*23:01; ZNF560; ENSG00000198028; CTA
KAFVVSSSL

SEQ ID NO: 101832 - protein, 9 aa, Homo sapiens
  Table A; Target 101832; HLA-A*30:01; ZNF560; ENSG00000198028; CTA
KAFVVSSSL

SEQ ID NO: 101833 - protein, 9 aa, Homo sapiens
  Table A; Target 101833; HLA-A*31:01; ZNF560; ENSG00000198028; CTA
KAFVVSSSL

SEQ ID NO: 101834 - protein, 9 aa, Homo sapiens
  Table A; Target 101834; HLA-A*32:01; ZNF560; ENSG00000198028; CTA
KAFVVSSSL

SEQ ID NO: 101835 - protein, 9 aa, Homo sapiens
  Table A; Target 101835; HLA-B*07:02; ZNF560; ENSG00000198028; CTA
KAFVVSSSL

SEQ ID NO: 101836 - protein, 9 aa, Homo sapiens
  Table A; Target 101836; HLA-B*08:01; ZNF560; ENSG00000198028; CTA
KAFVVSSSL

SEQ ID NO: 101837 - protein, 9 aa, Homo sapiens
  Table A; Target 101837; HLA-B*15:01; ZNF560; ENSG00000198028; CTA
KAFVVSSSL

SEQ ID NO: 101838 - protein, 9 aa, Homo sapiens
  Table A; Target 101838; HLA-B*15:03; ZNF560; ENSG00000198028; CTA
KAFVVSSSL

SEQ ID NO: 101839 - protein, 9 aa, Homo sapiens
  Table A; Target 101839; HLA-B*37:01; ZNF560; ENSG00000198028; CTA
KAFVVSSSL

SEQ ID NO: 101840 - protein, 9 aa, Homo sapiens
  Table A; Target 101840; HLA-B*40:01; ZNF560; ENSG00000198028; CTA
KAFVVSSSL

SEQ ID NO: 101841 - protein, 9 aa, Homo sapiens
  Table A; Target 101841; HLA-B*40:02; ZNF560; ENSG00000198028; CTA
KAFVVSSSL

SEQ ID NO: 101842 - protein, 9 aa, Homo sapiens
  Table A; Target 101842; HLA-B*46:01; ZNF560; ENSG00000198028; CTA
KAFVVSSSL

SEQ ID NO: 101843 - protein, 9 aa, Homo sapiens
  Table A; Target 101843; HLA-B*51:01; ZNF560; ENSG00000198028; CTA
KAFVVSSSL

SEQ ID NO: 101844 - protein, 9 aa, Homo sapiens
  Table A; Target 101844; HLA-B*58:01; ZNF560; ENSG00000198028; CTA
KAFVVSSSL

SEQ ID NO: 101845 - protein, 9 aa, Homo sapiens
  Table A; Target 101845; HLA-C*01:02; ZNF560; ENSG00000198028; CTA
KAFVVSSSL

SEQ ID NO: 101846 - protein, 9 aa, Homo sapiens
  Table A; Target 101846; HLA-C*02:02; ZNF560; ENSG00000198028; CTA
KAFVVSSSL

SEQ ID NO: 101847 - protein, 9 aa, Homo sapiens
  Table A; Target 101847; HLA-C*03:03; ZNF560; ENSG00000198028; CTA
KAFVVSSSL

SEQ ID NO: 101848 - protein, 9 aa, Homo sapiens
  Table A; Target 101848; HLA-C*03:04; ZNF560; ENSG00000198028; CTA
KAFVVSSSL

SEQ ID NO: 101849 - protein, 9 aa, Homo sapiens
  Table A; Target 101849; HLA-C*05:01; ZNF560; ENSG00000198028; CTA
KAFVVSSSL

SEQ ID NO: 101850 - protein, 9 aa, Homo sapiens
  Table A; Target 101850; HLA-C*07:02; ZNF560; ENSG00000198028; CTA
KAFVVSSSL

SEQ ID NO: 101851 - protein, 9 aa, Homo sapiens
  Table A; Target 101851; HLA-C*12:03; ZNF560; ENSG00000198028; CTA
KAFVVSSSL

SEQ ID NO: 101852 - protein, 9 aa, Homo sapiens
  Table A; Target 101852; HLA-C*14:02; ZNF560; ENSG00000198028; CTA
KAFVVSSSL

SEQ ID NO: 101853 - protein, 9 aa, Homo sapiens
  Table A; Target 101853; HLA-C*16:01; ZNF560; ENSG00000198028; CTA
KAFVVSSSL

SEQ ID NO: 101854 - protein, 9 aa, Homo sapiens
  Table A; Target 101854; HLA-C*16:02; ZNF560; ENSG00000198028; CTA
KAFVVSSSL

SEQ ID NO: 101855 - protein, 9 aa, Homo sapiens
  Table A; Target 101855; HLA-C*16:04; ZNF560; ENSG00000198028; CTA
KAFVVSSSL

SEQ ID NO: 101856 - protein, 9 aa, Homo sapiens
  Table A; Target 101856; HLA-B*08:01; ZNF560; ENSG00000198028; CTA
KAYSRSCVL

SEQ ID NO: 101857 - protein, 9 aa, Homo sapiens
  Table A; Target 101857; HLA-B*37:01; ZNF560; ENSG00000198028; CTA
KAYSRSCVL

SEQ ID NO: 101858 - protein, 9 aa, Homo sapiens
  Table A; Target 101858; HLA-C*03:03; ZNF560; ENSG00000198028; CTA
KAYSRSCVL

SEQ ID NO: 101859 - protein, 9 aa, Homo sapiens
  Table A; Target 101859; HLA-C*03:04; ZNF560; ENSG00000198028; CTA
KAYSRSCVL

SEQ ID NO: 101860 - protein, 9 aa, Homo sapiens
  Table A; Target 101860; HLA-C*12:03; ZNF560; ENSG00000198028; CTA
KAYSRSCVL

SEQ ID NO: 101861 - protein, 9 aa, Homo sapiens
  Table A; Target 101861; HLA-C*16:01; ZNF560; ENSG00000198028; CTA
KAYSRSCVL

SEQ ID NO: 101862 - protein, 8 aa, Homo sapiens
  Table A; Target 101862; HLA-A*03:02; ZNF560; ENSG00000198028; CTA
KCGKAFTK

SEQ ID NO: 101863 - protein, 9 aa, Homo sapiens
  Table A; Target 101863; HLA-B*37:01; ZNF560; ENSG00000198028; CTA
KEYGKAFGT

SEQ ID NO: 101864 - protein, 10 aa, Homo sapiens
  Table A; Target 101864; HLA-B*40:02; ZNF560; ENSG00000198028; CTA
KEYGKAFGTS

SEQ ID NO: 101865 - protein, 10 aa, Homo sapiens
  Table A; Target 101865; HLA-C*06:02; ZNF560; ENSG00000198028; CTA
KEYGKAFGTS

SEQ ID NO: 101866 - protein, 11 aa, Homo sapiens
  Table A; Target 101866; HLA-B*40:02; ZNF560; ENSG00000198028; CTA
KEYGKAFGTSS

SEQ ID NO: 101867 - protein, 9 aa, Homo sapiens
  Table A; Target 101867; HLA-B*38:01; ZNF560; ENSG00000198028; CTA
KHQTSVSAL

SEQ ID NO: 101868 - protein, 9 aa, Homo sapiens
  Table A; Target 101868; HLA-B*39:01; ZNF560; ENSG00000198028; CTA
KHQTSVSAL

SEQ ID NO: 101869 - protein, 8 aa, Homo sapiens
  Table A; Target 101869; HLA-A*30:02; ZNF560; ENSG00000198028; CTA
KNLSSVGY

SEQ ID NO: 101870 - protein, 8 aa, Homo sapiens
  Table A; Target 101870; HLA-B*15:03; ZNF560; ENSG00000198028; CTA
KNLSSVGY

SEQ ID NO: 101871 - protein, 10 aa, Homo sapiens
  Table A; Target 101871; HLA-A*23:01; ZNF560; ENSG00000198028; CTA
KNLSSVGYQL

SEQ ID NO: 101872 - protein, 10 aa, Homo sapiens
  Table A; Target 101872; HLA-C*07:02; ZNF560; ENSG00000198028; CTA
KNLSSVGYQL

SEQ ID NO: 101873 - protein, 8 aa, Homo sapiens
  Table A; Target 101873; HLA-B*55:01; ZNF560; ENSG00000198028; CTA
KPFTSSAC

SEQ ID NO: 101874 - protein, 8 aa, Homo sapiens
  Table A; Target 101874; HLA-B*56:01; ZNF560; ENSG00000198028; CTA
KPFTSSAC

SEQ ID NO: 101875 - protein, 9 aa, Homo sapiens
  Table A; Target 101875; HLA-B*07:02; ZNF560; ENSG00000198028; CTA
KPFTSSACL

SEQ ID NO: 101876 - protein, 9 aa, Homo sapiens
  Table A; Target 101876; HLA-B*35:03; ZNF560; ENSG00000198028; CTA
KPFTSSACL

SEQ ID NO: 101877 - protein, 9 aa, Homo sapiens
  Table A; Target 101877; HLA-B*56:01; ZNF560; ENSG00000198028; CTA
KPFTSSACL

SEQ ID NO: 101878 - protein, 9 aa, Homo sapiens
  Table A; Target 101878; HLA-C*07:02; ZNF560; ENSG00000198028; CTA
KPFTSSACL

SEQ ID NO: 101879 - protein, 8 aa, Homo sapiens
  Table A; Target 101879; HLA-B*08:01; ZNF560; ENSG00000198028; CTA
KPYEHKEY

SEQ ID NO: 101880 - protein, 8 aa, Homo sapiens
  Table A; Target 101880; HLA-C*07:01; ZNF560; ENSG00000198028; CTA
KPYEHKEY

SEQ ID NO: 101881 - protein, 9 aa, Homo sapiens
  Table A; Target 101881; HLA-A*03:02; ZNF560; ENSG00000198028; CTA
KQCEDVFCK

SEQ ID NO: 101882 - protein, 8 aa, Homo sapiens
  Table A; Target 101882; HLA-A*30:02; ZNF560; ENSG00000198028; CTA
KSFEGTDY

SEQ ID NO: 101883 - protein, 8 aa, Homo sapiens
  Table A; Target 101883; HLA-A*32:01; ZNF560; ENSG00000198028; CTA
KSFEGTDY

SEQ ID NO: 101884 - protein, 8 aa, Homo sapiens
  Table A; Target 101884; HLA-B*15:01; ZNF560; ENSG00000198028; CTA
KSFEGTDY

SEQ ID NO: 101885 - protein, 8 aa, Homo sapiens
  Table A; Target 101885; HLA-B*15:03; ZNF560; ENSG00000198028; CTA
KSFEGTDY

SEQ ID NO: 101886 - protein, 8 aa, Homo sapiens
  Table A; Target 101886; HLA-B*39:01; ZNF560; ENSG00000198028; CTA
KSFEGTDY

SEQ ID NO: 101887 - protein, 8 aa, Homo sapiens
  Table A; Target 101887; HLA-B*46:01; ZNF560; ENSG00000198028; CTA
KSFEGTDY

SEQ ID NO: 101888 - protein, 8 aa, Homo sapiens
  Table A; Target 101888; HLA-B*58:01; ZNF560; ENSG00000198028; CTA
KSFEGTDY

SEQ ID NO: 101889 - protein, 8 aa, Homo sapiens
  Table A; Target 101889; HLA-C*01:02; ZNF560; ENSG00000198028; CTA
KSFEGTDY

SEQ ID NO: 101890 - protein, 8 aa, Homo sapiens
  Table A; Target 101890; HLA-C*05:01; ZNF560; ENSG00000198028; CTA
KSFEGTDY

SEQ ID NO: 101891 - protein, 8 aa, Homo sapiens
  Table A; Target 101891; HLA-C*12:03; ZNF560; ENSG00000198028; CTA
KSFEGTDY

SEQ ID NO: 101892 - protein, 8 aa, Homo sapiens
  Table A; Target 101892; HLA-C*14:02; ZNF560; ENSG00000198028; CTA
KSFEGTDY

SEQ ID NO: 101893 - protein, 8 aa, Homo sapiens
  Table A; Target 101893; HLA-C*16:01; ZNF560; ENSG00000198028; CTA
KSFEGTDY

SEQ ID NO: 101894 - protein, 8 aa, Homo sapiens
  Table A; Target 101894; HLA-C*16:02; ZNF560; ENSG00000198028; CTA
KSFEGTDY

SEQ ID NO: 101895 - protein, 10 aa, Homo sapiens
  Table A; Target 101895; HLA-A*03:01; ZNF560; ENSG00000198028; CTA
KSFEGTDYGK

SEQ ID NO: 101896 - protein, 10 aa, Homo sapiens
  Table A; Target 101896; HLA-A*03:02; ZNF560; ENSG00000198028; CTA
KSFEGTDYGK

SEQ ID NO: 101897 - protein, 10 aa, Homo sapiens
  Table A; Target 101897; HLA-A*11:01; ZNF560; ENSG00000198028; CTA
KSFEGTDYGK

SEQ ID NO: 101898 - protein, 10 aa, Homo sapiens
  Table A; Target 101898; HLA-A*31:01; ZNF560; ENSG00000198028; CTA
KSFEGTDYGK

SEQ ID NO: 101899 - protein, 10 aa, Homo sapiens
  Table A; Target 101899; HLA-B*27:02; ZNF560; ENSG00000198028; CTA
KSFEGTDYGK

SEQ ID NO: 101900 - protein, 10 aa, Homo sapiens
  Table A; Target 101900; HLA-B*27:05; ZNF560; ENSG00000198028; CTA
KSFEGTDYGK

SEQ ID NO: 101901 - protein, 10 aa, Homo sapiens
  Table A; Target 101901; HLA-B*57:01; ZNF560; ENSG00000198028; CTA
KSFEGTDYGK

SEQ ID NO: 101902 - protein, 10 aa, Homo sapiens
  Table A; Target 101902; HLA-B*58:01; ZNF560; ENSG00000198028; CTA
KSFEGTDYGK

SEQ ID NO: 101903 - protein, 11 aa, Homo sapiens
  Table A; Target 101903; HLA-B*58:01; ZNF560; ENSG00000198028; CTA
KSFEGTDYGKA

SEQ ID NO: 101904 - protein, 9 aa, Homo sapiens
  Table A; Target 101904; HLA-A*02:04; ZNF560; ENSG00000198028; CTA
KSFRLILNV

SEQ ID NO: 101905 - protein, 9 aa, Homo sapiens
  Table A; Target 101905; HLA-A*68:02; ZNF560; ENSG00000198028; CTA
KSFRLILNV

SEQ ID NO: 101906 - protein, 9 aa, Homo sapiens
  Table A; Target 101906; HLA-B*57:01; ZNF560; ENSG00000198028; CTA
KSFRLILNV

SEQ ID NO: 101907 - protein, 9 aa, Homo sapiens
  Table A; Target 101907; HLA-A*03:02; ZNF560; ENSG00000198028; CTA
KTFTVPSGF

SEQ ID NO: 101908 - protein, 9 aa, Homo sapiens
  Table A; Target 101908; HLA-A*23:01; ZNF560; ENSG00000198028; CTA
KTFTVPSGF

SEQ ID NO: 101909 - protein, 9 aa, Homo sapiens
  Table A; Target 101909; HLA-A*25:01; ZNF560; ENSG00000198028; CTA
KTFTVPSGF

SEQ ID NO: 101910 - protein, 9 aa, Homo sapiens
  Table A; Target 101910; HLA-A*26:01; ZNF560; ENSG00000198028; CTA
KTFTVPSGF

SEQ ID NO: 101911 - protein, 9 aa, Homo sapiens
  Table A; Target 101911; HLA-A*30:02; ZNF560; ENSG00000198028; CTA
KTFTVPSGF

SEQ ID NO: 101912 - protein, 9 aa, Homo sapiens
  Table A; Target 101912; HLA-A*31:01; ZNF560; ENSG00000198028; CTA
KTFTVPSGF

SEQ ID NO: 101913 - protein, 9 aa, Homo sapiens
  Table A; Target 101913; HLA-A*32:01; ZNF560; ENSG00000198028; CTA
KTFTVPSGF

SEQ ID NO: 101914 - protein, 9 aa, Homo sapiens
  Table A; Target 101914; HLA-B*15:01; ZNF560; ENSG00000198028; CTA
KTFTVPSGF

SEQ ID NO: 101915 - protein, 9 aa, Homo sapiens
  Table A; Target 101915; HLA-B*46:01; ZNF560; ENSG00000198028; CTA
KTFTVPSGF

SEQ ID NO: 101916 - protein, 9 aa, Homo sapiens
  Table A; Target 101916; HLA-B*57:01; ZNF560; ENSG00000198028; CTA
KTFTVPSGF

SEQ ID NO: 101917 - protein, 9 aa, Homo sapiens
  Table A; Target 101917; HLA-B*58:01; ZNF560; ENSG00000198028; CTA
KTFTVPSGF

SEQ ID NO: 101918 - protein, 9 aa, Homo sapiens
  Table A; Target 101918; HLA-C*02:02; ZNF560; ENSG00000198028; CTA
KTFTVPSGF

SEQ ID NO: 101919 - protein, 9 aa, Homo sapiens
  Table A; Target 101919; HLA-C*16:04; ZNF560; ENSG00000198028; CTA
KTFTVPSGF

SEQ ID NO: 101920 - protein, 10 aa, Homo sapiens
  Table A; Target 101920; HLA-A*03:01; ZNF560; ENSG00000198028; CTA
KTFTVPSGFL

SEQ ID NO: 101921 - protein, 8 aa, Homo sapiens
  Table A; Target 101921; HLA-B*57:01; ZNF560; ENSG00000198028; CTA
KTKGPALW

SEQ ID NO: 101922 - protein, 8 aa, Homo sapiens
  Table A; Target 101922; HLA-A*23:01; ZNF560; ENSG00000198028; CTA
KTLNGIQL

SEQ ID NO: 101923 - protein, 8 aa, Homo sapiens
  Table A; Target 101923; HLA-C*03:04; ZNF560; ENSG00000198028; CTA
KTLNGIQL

SEQ ID NO: 101924 - protein, 10 aa, Homo sapiens
  Table A; Target 101924; HLA-A*03:01; ZNF560; ENSG00000198028; CTA
KTLNGIQLAR

SEQ ID NO: 101925 - protein, 10 aa, Homo sapiens
  Table A; Target 101925; HLA-A*03:02; ZNF560; ENSG00000198028; CTA
KTLNGIQLAR

SEQ ID NO: 101926 - protein, 10 aa, Homo sapiens
  Table A; Target 101926; HLA-A*11:01; ZNF560; ENSG00000198028; CTA
KTLNGIQLAR

SEQ ID NO: 101927 - protein, 10 aa, Homo sapiens
  Table A; Target 101927; HLA-A*31:01; ZNF560; ENSG00000198028; CTA
KTLNGIQLAR

SEQ ID NO: 101928 - protein, 10 aa, Homo sapiens
  Table A; Target 101928; HLA-A*33:03; ZNF560; ENSG00000198028; CTA
KTLNGIQLAR

SEQ ID NO: 101929 - protein, 10 aa, Homo sapiens
  Table A; Target 101929; HLA-B*57:01; ZNF560; ENSG00000198028; CTA
KTLNGIQLAR

SEQ ID NO: 101930 - protein, 10 aa, Homo sapiens
  Table A; Target 101930; HLA-C*07:06; ZNF560; ENSG00000198028; CTA
KTLNGIQLAR

SEQ ID NO: 101931 - protein, 9 aa, Homo sapiens
  Table A; Target 101931; HLA-A*03:01; ZNF560; ENSG00000198028; CTA
KTLTKIKPY

SEQ ID NO: 101932 - protein, 9 aa, Homo sapiens
  Table A; Target 101932; HLA-A*30:02; ZNF560; ENSG00000198028; CTA
KTLTKIKPY

SEQ ID NO: 101933 - protein, 9 aa, Homo sapiens
  Table A; Target 101933; HLA-A*31:01; ZNF560; ENSG00000198028; CTA
KTLTKIKPY

SEQ ID NO: 101934 - protein, 9 aa, Homo sapiens
  Table A; Target 101934; HLA-B*57:01; ZNF560; ENSG00000198028; CTA
KTLTKIKPY

SEQ ID NO: 101935 - protein, 9 aa, Homo sapiens
  Table A; Target 101935; HLA-C*06:02; ZNF560; ENSG00000198028; CTA
KTLTKIKPY

SEQ ID NO: 101936 - protein, 9 aa, Homo sapiens
  Table A; Target 101936; HLA-A*03:01; ZNF560; ENSG00000198028; CTA
KTNMSTQNR

SEQ ID NO: 101937 - protein, 9 aa, Homo sapiens
  Table A; Target 101937; HLA-A*03:02; ZNF560; ENSG00000198028; CTA
KTNMSTQNR

SEQ ID NO: 101938 - protein, 9 aa, Homo sapiens
  Table A; Target 101938; HLA-A*11:01; ZNF560; ENSG00000198028; CTA
KTNMSTQNR

SEQ ID NO: 101939 - protein, 9 aa, Homo sapiens
  Table A; Target 101939; HLA-A*31:01; ZNF560; ENSG00000198028; CTA
KTNMSTQNR

SEQ ID NO: 101940 - protein, 9 aa, Homo sapiens
  Table A; Target 101940; HLA-A*32:01; ZNF560; ENSG00000198028; CTA
KTNMSTQNR

SEQ ID NO: 101941 - protein, 9 aa, Homo sapiens
  Table A; Target 101941; HLA-A*33:01; ZNF560; ENSG00000198028; CTA
KTNMSTQNR

SEQ ID NO: 101942 - protein, 9 aa, Homo sapiens
  Table A; Target 101942; HLA-A*33:03; ZNF560; ENSG00000198028; CTA
KTNMSTQNR

SEQ ID NO: 101943 - protein, 9 aa, Homo sapiens
  Table A; Target 101943; HLA-A*68:01; ZNF560; ENSG00000198028; CTA
KTNMSTQNR

SEQ ID NO: 101944 - protein, 9 aa, Homo sapiens
  Table A; Target 101944; HLA-C*07:06; ZNF560; ENSG00000198028; CTA
KTNMSTQNR

SEQ ID NO: 101945 - protein, 11 aa, Homo sapiens
  Table A; Target 101945; HLA-A*25:01; ZNF560; ENSG00000198028; CTA
KTQSGEKLNEW

SEQ ID NO: 101946 - protein, 11 aa, Homo sapiens
  Table A; Target 101946; HLA-A*31:01; ZNF560; ENSG00000198028; CTA
KTQSGEKLNEW

SEQ ID NO: 101947 - protein, 11 aa, Homo sapiens
  Table A; Target 101947; HLA-A*32:01; ZNF560; ENSG00000198028; CTA
KTQSGEKLNEW

SEQ ID NO: 101948 - protein, 11 aa, Homo sapiens
  Table A; Target 101948; HLA-A*33:01; ZNF560; ENSG00000198028; CTA
KTQSGEKLNEW

SEQ ID NO: 101949 - protein, 11 aa, Homo sapiens
  Table A; Target 101949; HLA-B*57:01; ZNF560; ENSG00000198028; CTA
KTQSGEKLNEW

SEQ ID NO: 101950 - protein, 11 aa, Homo sapiens
  Table A; Target 101950; HLA-B*58:01; ZNF560; ENSG00000198028; CTA
KTQSGEKLNEW

SEQ ID NO: 101951 - protein, 8 aa, Homo sapiens
  Table A; Target 101951; HLA-C*06:02; ZNF560; ENSG00000198028; CTA
KTSTIRKV

SEQ ID NO: 101952 - protein, 8 aa, Homo sapiens
  Table A; Target 101952; HLA-C*12:03; ZNF560; ENSG00000198028; CTA
KTSTIRKV

SEQ ID NO: 101953 - protein, 8 aa, Homo sapiens
  Table A; Target 101953; HLA-C*16:01; ZNF560; ENSG00000198028; CTA
KTSTIRKV

SEQ ID NO: 101954 - protein, 8 aa, Homo sapiens
  Table A; Target 101954; HLA-C*16:02; ZNF560; ENSG00000198028; CTA
KTSTIRKV

SEQ ID NO: 101955 - protein, 9 aa, Homo sapiens
  Table A; Target 101955; HLA-C*06:02; ZNF560; ENSG00000198028; CTA
KTSTIRKVS

SEQ ID NO: 101956 - protein, 11 aa, Homo sapiens
  Table A; Target 101956; HLA-B*57:01; ZNF560; ENSG00000198028; CTA
KTSTIRKVSVF

SEQ ID NO: 101957 - protein, 9 aa, Homo sapiens
  Table A; Target 101957; HLA-A*02:07; ZNF560; ENSG00000198028; CTA
KVFVSFSSL

SEQ ID NO: 101958 - protein, 9 aa, Homo sapiens
  Table A; Target 101958; HLA-A*25:01; ZNF560; ENSG00000198028; CTA
KVFVSFSSL

SEQ ID NO: 101959 - protein, 9 aa, Homo sapiens
  Table A; Target 101959; HLA-A*32:01; ZNF560; ENSG00000198028; CTA
KVFVSFSSL

SEQ ID NO: 101960 - protein, 9 aa, Homo sapiens
  Table A; Target 101960; HLA-B*07:02; ZNF560; ENSG00000198028; CTA
KVFVSFSSL

SEQ ID NO: 101961 - protein, 9 aa, Homo sapiens
  Table A; Target 101961; HLA-B*15:01; ZNF560; ENSG00000198028; CTA
KVFVSFSSL

SEQ ID NO: 101962 - protein, 9 aa, Homo sapiens
  Table A; Target 101962; HLA-B*15:03; ZNF560; ENSG00000198028; CTA
KVFVSFSSL

SEQ ID NO: 101963 - protein, 9 aa, Homo sapiens
  Table A; Target 101963; HLA-B*46:01; ZNF560; ENSG00000198028; CTA
KVFVSFSSL

SEQ ID NO: 101964 - protein, 9 aa, Homo sapiens
  Table A; Target 101964; HLA-B*58:01; ZNF560; ENSG00000198028; CTA
KVFVSFSSL

SEQ ID NO: 101965 - protein, 9 aa, Homo sapiens
  Table A; Target 101965; HLA-C*01:02; ZNF560; ENSG00000198028; CTA
KVFVSFSSL

SEQ ID NO: 101966 - protein, 9 aa, Homo sapiens
  Table A; Target 101966; HLA-C*03:03; ZNF560; ENSG00000198028; CTA
KVFVSFSSL

SEQ ID NO: 101967 - protein, 9 aa, Homo sapiens
  Table A; Target 101967; HLA-C*03:04; ZNF560; ENSG00000198028; CTA
KVFVSFSSL

SEQ ID NO: 101968 - protein, 10 aa, Homo sapiens
  Table A; Target 101968; HLA-A*03:01; ZNF560; ENSG00000198028; CTA
KVSVFSKHGK

SEQ ID NO: 101969 - protein, 10 aa, Homo sapiens
  Table A; Target 101969; HLA-C*03:04; ZNF560; ENSG00000198028; CTA
LARNQNGEEL

SEQ ID NO: 101970 - protein, 11 aa, Homo sapiens
  Table A; Target 101970; HLA-A*30:02; ZNF560; ENSG00000198028; CTA
LARNQNGEELY

SEQ ID NO: 101971 - protein, 10 aa, Homo sapiens
  Table A; Target 101971; HLA-B*40:01; ZNF560; ENSG00000198028; CTA
LEEEEELSTL

SEQ ID NO: 101972 - protein, 9 aa, Homo sapiens
  Table A; Target 101972; HLA-A*30:01; ZNF560; ENSG00000198028; CTA
LEEEELRTL

SEQ ID NO: 101973 - protein, 9 aa, Homo sapiens
  Table A; Target 101973; HLA-B*18:01; ZNF560; ENSG00000198028; CTA
LEEEELRTL

SEQ ID NO: 101974 - protein, 9 aa, Homo sapiens
  Table A; Target 101974; HLA-B*40:01; ZNF560; ENSG00000198028; CTA
LEEEELRTL

SEQ ID NO: 101975 - protein, 9 aa, Homo sapiens
  Table A; Target 101975; HLA-B*40:02; ZNF560; ENSG00000198028; CTA
LEEEELRTL

SEQ ID NO: 101976 - protein, 9 aa, Homo sapiens
  Table A; Target 101976; HLA-B*44:02; ZNF560; ENSG00000198028; CTA
LEEEELRTL

SEQ ID NO: 101977 - protein, 9 aa, Homo sapiens
  Table A; Target 101977; HLA-B*49:01; ZNF560; ENSG00000198028; CTA
LEEEELRTL

SEQ ID NO: 101978 - protein, 10 aa, Homo sapiens
  Table A; Target 101978; HLA-B*49:01; ZNF560; ENSG00000198028; CTA
LENYENVAKV

SEQ ID NO: 101979 - protein, 9 aa, Homo sapiens
  Table A; Target 101979; HLA-A*23:01; ZNF560; ENSG00000198028; CTA
LFKPSLISW

SEQ ID NO: 101980 - protein, 9 aa, Homo sapiens
  Table A; Target 101980; HLA-A*24:02; ZNF560; ENSG00000198028; CTA
LFKPSLISW

SEQ ID NO: 101981 - protein, 9 aa, Homo sapiens
  Table A; Target 101981; HLA-B*57:01; ZNF560; ENSG00000198028; CTA
LFKPSLISW

SEQ ID NO: 101982 - protein, 9 aa, Homo sapiens
  Table A; Target 101982; HLA-A*23:01; ZNF560; ENSG00000198028; CTA
LFKPSVISW

SEQ ID NO: 101983 - protein, 9 aa, Homo sapiens
  Table A; Target 101983; HLA-A*24:02; ZNF560; ENSG00000198028; CTA
LFKPSVISW

SEQ ID NO: 101984 - protein, 9 aa, Homo sapiens
  Table A; Target 101984; HLA-B*57:01; ZNF560; ENSG00000198028; CTA
LFKPSVISW

SEQ ID NO: 101985 - protein, 9 aa, Homo sapiens
  Table A; Target 101985; HLA-A*11:01; ZNF560; ENSG00000198028; CTA
LILNVQVQR

SEQ ID NO: 101986 - protein, 9 aa, Homo sapiens
  Table A; Target 101986; HLA-A*31:01; ZNF560; ENSG00000198028; CTA
LILNVQVQR

SEQ ID NO: 101987 - protein, 9 aa, Homo sapiens
  Table A; Target 101987; HLA-A*33:01; ZNF560; ENSG00000198028; CTA
LILNVQVQR

SEQ ID NO: 101988 - protein, 9 aa, Homo sapiens
  Table A; Target 101988; HLA-A*33:03; ZNF560; ENSG00000198028; CTA
LILNVQVQR

SEQ ID NO: 101989 - protein, 9 aa, Homo sapiens
  Table A; Target 101989; HLA-A*68:01; ZNF560; ENSG00000198028; CTA
LILNVQVQR

SEQ ID NO: 101990 - protein, 9 aa, Homo sapiens
  Table A; Target 101990; HLA-C*07:06; ZNF560; ENSG00000198028; CTA
LILNVQVQR

SEQ ID NO: 101991 - protein, 9 aa, Homo sapiens
  Table A; Target 101991; HLA-A*02:01; ZNF560; ENSG00000198028; CTA
LLDPAQRNL

SEQ ID NO: 101992 - protein, 9 aa, Homo sapiens
  Table A; Target 101992; HLA-A*02:04; ZNF560; ENSG00000198028; CTA
LLDPAQRNL

SEQ ID NO: 101993 - protein, 9 aa, Homo sapiens
  Table A; Target 101993; HLA-A*02:07; ZNF560; ENSG00000198028; CTA
LLDPAQRNL

SEQ ID NO: 101994 - protein, 9 aa, Homo sapiens
  Table A; Target 101994; HLA-A*03:01; ZNF560; ENSG00000198028; CTA
LLDPAQRNL

SEQ ID NO: 101995 - protein, 9 aa, Homo sapiens
  Table A; Target 101995; HLA-B*55:01; ZNF560; ENSG00000198028; CTA
LLDPAQRNL

SEQ ID NO: 101996 - protein, 9 aa, Homo sapiens
  Table A; Target 101996; HLA-C*03:03; ZNF560; ENSG00000198028; CTA
LLDPAQRNL

SEQ ID NO: 101997 - protein, 9 aa, Homo sapiens
  Table A; Target 101997; HLA-C*03:04; ZNF560; ENSG00000198028; CTA
LLDPAQRNL

SEQ ID NO: 101998 - protein, 9 aa, Homo sapiens
  Table A; Target 101998; HLA-C*05:01; ZNF560; ENSG00000198028; CTA
LLDPAQRNL

SEQ ID NO: 101999 - protein, 10 aa, Homo sapiens
  Table A; Target 101999; HLA-A*02:07; ZNF560; ENSG00000198028; CTA
LLDPAQRNLY

SEQ ID NO: 102000 - protein, 10 aa, Homo sapiens
  Table A; Target 102000; HLA-A*29:02; ZNF560; ENSG00000198028; CTA
LLDPAQRNLY

SEQ ID NO: 102001 - protein, 10 aa, Homo sapiens
  Table A; Target 102001; HLA-A*30:02; ZNF560; ENSG00000198028; CTA
LLDPAQRNLY

SEQ ID NO: 102002 - protein, 10 aa, Homo sapiens
  Table A; Target 102002; HLA-A*32:01; ZNF560; ENSG00000198028; CTA
LLDPAQRNLY

SEQ ID NO: 102003 - protein, 10 aa, Homo sapiens
  Table A; Target 102003; HLA-B*15:01; ZNF560; ENSG00000198028; CTA
LLDPAQRNLY

SEQ ID NO: 102004 - protein, 10 aa, Homo sapiens
  Table A; Target 102004; HLA-B*58:01; ZNF560; ENSG00000198028; CTA
LLDPAQRNLY

SEQ ID NO: 102005 - protein, 10 aa, Homo sapiens
  Table A; Target 102005; HLA-C*02:02; ZNF560; ENSG00000198028; CTA
LLDPAQRNLY

SEQ ID NO: 102006 - protein, 10 aa, Homo sapiens
  Table A; Target 102006; HLA-C*07:04; ZNF560; ENSG00000198028; CTA
LLDPAQRNLY

SEQ ID NO: 102007 - protein, 10 aa, Homo sapiens
  Table A; Target 102007; HLA-C*16:02; ZNF560; ENSG00000198028; CTA
LLDPAQRNLY

SEQ ID NO: 102008 - protein, 9 aa, Homo sapiens
  Table A; Target 102008; HLA-A*01:01; ZNF560; ENSG00000198028; CTA
LLDPVQRNL

SEQ ID NO: 102009 - protein, 9 aa, Homo sapiens
  Table A; Target 102009; HLA-A*02:01; ZNF560; ENSG00000198028; CTA
LLDPVQRNL

SEQ ID NO: 102010 - protein, 9 aa, Homo sapiens
  Table A; Target 102010; HLA-A*02:03; ZNF560; ENSG00000198028; CTA
LLDPVQRNL

SEQ ID NO: 102011 - protein, 9 aa, Homo sapiens
  Table A; Target 102011; HLA-A*02:04; ZNF560; ENSG00000198028; CTA
LLDPVQRNL

SEQ ID NO: 102012 - protein, 9 aa, Homo sapiens
  Table A; Target 102012; HLA-A*02:07; ZNF560; ENSG00000198028; CTA
LLDPVQRNL

SEQ ID NO: 102013 - protein, 9 aa, Homo sapiens
  Table A; Target 102013; HLA-A*03:01; ZNF560; ENSG00000198028; CTA
LLDPVQRNL

SEQ ID NO: 102014 - protein, 9 aa, Homo sapiens
  Table A; Target 102014; HLA-A*03:02; ZNF560; ENSG00000198028; CTA
LLDPVQRNL

SEQ ID NO: 102015 - protein, 9 aa, Homo sapiens
  Table A; Target 102015; HLA-A*68:02; ZNF560; ENSG00000198028; CTA
LLDPVQRNL

SEQ ID NO: 102016 - protein, 9 aa, Homo sapiens
  Table A; Target 102016; HLA-B*13:02; ZNF560; ENSG00000198028; CTA
LLDPVQRNL

SEQ ID NO: 102017 - protein, 9 aa, Homo sapiens
  Table A; Target 102017; HLA-B*38:01; ZNF560; ENSG00000198028; CTA
LLDPVQRNL

SEQ ID NO: 102018 - protein, 9 aa, Homo sapiens
  Table A; Target 102018; HLA-B*55:01; ZNF560; ENSG00000198028; CTA
LLDPVQRNL

SEQ ID NO: 102019 - protein, 9 aa, Homo sapiens
  Table A; Target 102019; HLA-C*03:03; ZNF560; ENSG00000198028; CTA
LLDPVQRNL

SEQ ID NO: 102020 - protein, 9 aa, Homo sapiens
  Table A; Target 102020; HLA-C*03:04; ZNF560; ENSG00000198028; CTA
LLDPVQRNL

SEQ ID NO: 102021 - protein, 9 aa, Homo sapiens
  Table A; Target 102021; HLA-C*05:01; ZNF560; ENSG00000198028; CTA
LLDPVQRNL

SEQ ID NO: 102022 - protein, 9 aa, Homo sapiens
  Table A; Target 102022; HLA-C*16:01; ZNF560; ENSG00000198028; CTA
LLDPVQRNL

SEQ ID NO: 102023 - protein, 9 aa, Homo sapiens
  Table A; Target 102023; HLA-C*16:02; ZNF560; ENSG00000198028; CTA
LLDPVQRNL

SEQ ID NO: 102024 - protein, 10 aa, Homo sapiens
  Table A; Target 102024; HLA-A*02:07; ZNF560; ENSG00000198028; CTA
LLDPVQRNLY

SEQ ID NO: 102025 - protein, 10 aa, Homo sapiens
  Table A; Target 102025; HLA-A*03:01; ZNF560; ENSG00000198028; CTA
LLDPVQRNLY

SEQ ID NO: 102026 - protein, 10 aa, Homo sapiens
  Table A; Target 102026; HLA-A*29:02; ZNF560; ENSG00000198028; CTA
LLDPVQRNLY

SEQ ID NO: 102027 - protein, 10 aa, Homo sapiens
  Table A; Target 102027; HLA-A*30:02; ZNF560; ENSG00000198028; CTA
LLDPVQRNLY

SEQ ID NO: 102028 - protein, 10 aa, Homo sapiens
  Table A; Target 102028; HLA-A*32:01; ZNF560; ENSG00000198028; CTA
LLDPVQRNLY

SEQ ID NO: 102029 - protein, 10 aa, Homo sapiens
  Table A; Target 102029; HLA-B*15:01; ZNF560; ENSG00000198028; CTA
LLDPVQRNLY

SEQ ID NO: 102030 - protein, 10 aa, Homo sapiens
  Table A; Target 102030; HLA-C*07:04; ZNF560; ENSG00000198028; CTA
LLDPVQRNLY

SEQ ID NO: 102031 - protein, 9 aa, Homo sapiens
  Table A; Target 102031; HLA-A*32:01; ZNF560; ENSG00000198028; CTA
LQQGVLQDW

SEQ ID NO: 102032 - protein, 9 aa, Homo sapiens
  Table A; Target 102032; HLA-B*44:02; ZNF560; ENSG00000198028; CTA
LQQGVLQDW

SEQ ID NO: 102033 - protein, 9 aa, Homo sapiens
  Table A; Target 102033; HLA-C*16:04; ZNF560; ENSG00000198028; CTA
LQQGVLQDW

SEQ ID NO: 102034 - protein, 8 aa, Homo sapiens
  Table A; Target 102034; HLA-C*03:03; ZNF560; ENSG00000198028; CTA
LSSVGYQL

SEQ ID NO: 102035 - protein, 8 aa, Homo sapiens
  Table A; Target 102035; HLA-C*03:04; ZNF560; ENSG00000198028; CTA
LSSVGYQL

SEQ ID NO: 102036 - protein, 8 aa, Homo sapiens
  Table A; Target 102036; HLA-C*16:01; ZNF560; ENSG00000198028; CTA
LSSVGYQL

SEQ ID NO: 102037 - protein, 9 aa, Homo sapiens
  Table A; Target 102037; HLA-B*57:01; ZNF560; ENSG00000198028; CTA
LSSVGYQLF

SEQ ID NO: 102038 - protein, 8 aa, Homo sapiens
  Table A; Target 102038; HLA-C*16:01; ZNF560; ENSG00000198028; CTA
LSTLPRVL

SEQ ID NO: 102039 - protein, 11 aa, Homo sapiens
  Table A; Target 102039; HLA-B*57:01; ZNF560; ENSG00000198028; CTA
LSTLPRVLQEW

SEQ ID NO: 102040 - protein, 11 aa, Homo sapiens
  Table A; Target 102040; HLA-A*01:01; ZNF560; ENSG00000198028; CTA
LVDHLRTHTGY

SEQ ID NO: 102041 - protein, 8 aa, Homo sapiens
  Table A; Target 102041; HLA-A*23:01; ZNF560; ENSG00000198028; CTA
LYNKTSTI

SEQ ID NO: 102042 - protein, 8 aa, Homo sapiens
  Table A; Target 102042; HLA-A*24:02; ZNF560; ENSG00000198028; CTA
LYNKTSTI

SEQ ID NO: 102043 - protein, 8 aa, Homo sapiens
  Table A; Target 102043; HLA-B*51:01; ZNF560; ENSG00000198028; CTA
LYNKTSTI

SEQ ID NO: 102044 - protein, 8 aa, Homo sapiens
  Table A; Target 102044; HLA-C*14:02; ZNF560; ENSG00000198028; CTA
LYNKTSTI

SEQ ID NO: 102045 - protein, 9 aa, Homo sapiens
  Table A; Target 102045; HLA-A*31:01; ZNF560; ENSG00000198028; CTA
LYNKTSTIR

SEQ ID NO: 102046 - protein, 9 aa, Homo sapiens
  Table A; Target 102046; HLA-A*33:01; ZNF560; ENSG00000198028; CTA
LYNKTSTIR

SEQ ID NO: 102047 - protein, 9 aa, Homo sapiens
  Table A; Target 102047; HLA-A*33:03; ZNF560; ENSG00000198028; CTA
LYNKTSTIR

SEQ ID NO: 102048 - protein, 10 aa, Homo sapiens
  Table A; Target 102048; HLA-A*29:02; ZNF560; ENSG00000198028; CTA
LYRDVMLENY

SEQ ID NO: 102049 - protein, 10 aa, Homo sapiens
  Table A; Target 102049; HLA-A*23:01; ZNF560; ENSG00000198028; CTA
LYSDVMLENY

SEQ ID NO: 102050 - protein, 10 aa, Homo sapiens
  Table A; Target 102050; HLA-A*24:02; ZNF560; ENSG00000198028; CTA
LYSDVMLENY

SEQ ID NO: 102051 - protein, 10 aa, Homo sapiens
  Table A; Target 102051; HLA-A*29:02; ZNF560; ENSG00000198028; CTA
LYSDVMLENY

SEQ ID NO: 102052 - protein, 10 aa, Homo sapiens
  Table A; Target 102052; HLA-A*30:02; ZNF560; ENSG00000198028; CTA
LYSDVMLENY

SEQ ID NO: 102053 - protein, 10 aa, Homo sapiens
  Table A; Target 102053; HLA-C*14:02; ZNF560; ENSG00000198028; CTA
LYSDVMLENY

SEQ ID NO: 102054 - protein, 10 aa, Homo sapiens
  Table A; Target 102054; HLA-A*03:02; ZNF560; ENSG00000198028; CTA
MLENYENVAK

SEQ ID NO: 102055 - protein, 10 aa, Homo sapiens
  Table A; Target 102055; HLA-B*27:02; ZNF560; ENSG00000198028; CTA
MLENYENVAK

SEQ ID NO: 102056 - protein, 10 aa, Homo sapiens
  Table A; Target 102056; HLA-C*07:01; ZNF560; ENSG00000198028; CTA
MQTHIGIKPY

SEQ ID NO: 102057 - protein, 9 aa, Homo sapiens
  Table A; Target 102057; HLA-A*33:01; ZNF560; ENSG00000198028; CTA
NACEKAYSR

SEQ ID NO: 102058 - protein, 9 aa, Homo sapiens
  Table A; Target 102058; HLA-A*33:03; ZNF560; ENSG00000198028; CTA
NACEKAYSR

SEQ ID NO: 102059 - protein, 9 aa, Homo sapiens
  Table A; Target 102059; HLA-A*68:01; ZNF560; ENSG00000198028; CTA
NACEKAYSR

SEQ ID NO: 102060 - protein, 9 aa, Homo sapiens
  Table A; Target 102060; HLA-C*07:06; ZNF560; ENSG00000198028; CTA
NACEKAYSR

SEQ ID NO: 102061 - protein, 9 aa, Homo sapiens
  Table A; Target 102061; HLA-B*18:01; ZNF560; ENSG00000198028; CTA
NCYQYSVTF

SEQ ID NO: 102062 - protein, 9 aa, Homo sapiens
  Table A; Target 102062; HLA-B*35:01; ZNF560; ENSG00000198028; CTA
NCYQYSVTF

SEQ ID NO: 102063 - protein, 9 aa, Homo sapiens
  Table A; Target 102063; HLA-C*16:04; ZNF560; ENSG00000198028; CTA
NCYQYSVTF

SEQ ID NO: 102064 - protein, 10 aa, Homo sapiens
  Table A; Target 102064; HLA-A*23:01; ZNF560; ENSG00000198028; CTA
NGIQMDLVTF

SEQ ID NO: 102065 - protein, 9 aa, Homo sapiens
  Table A; Target 102065; HLA-B*38:01; ZNF560; ENSG00000198028; CTA
NHMQTHIGI

SEQ ID NO: 102066 - protein, 9 aa, Homo sapiens
  Table A; Target 102066; HLA-A*02:01; ZNF560; ENSG00000198028; CTA
NLSSVGYQL

SEQ ID NO: 102067 - protein, 9 aa, Homo sapiens
  Table A; Target 102067; HLA-A*02:03; ZNF560; ENSG00000198028; CTA
NLSSVGYQL

SEQ ID NO: 102068 - protein, 9 aa, Homo sapiens
  Table A; Target 102068; HLA-A*02:04; ZNF560; ENSG00000198028; CTA
NLSSVGYQL

SEQ ID NO: 102069 - protein, 9 aa, Homo sapiens
  Table A; Target 102069; HLA-A*02:07; ZNF560; ENSG00000198028; CTA
NLSSVGYQL

SEQ ID NO: 102070 - protein, 9 aa, Homo sapiens
  Table A; Target 102070; HLA-A*23:01; ZNF560; ENSG00000198028; CTA
NLSSVGYQL

SEQ ID NO: 102071 - protein, 9 aa, Homo sapiens
  Table A; Target 102071; HLA-A*68:02; ZNF560; ENSG00000198028; CTA
NLSSVGYQL

SEQ ID NO: 102072 - protein, 9 aa, Homo sapiens
  Table A; Target 102072; HLA-B*13:02; ZNF560; ENSG00000198028; CTA
NLSSVGYQL

SEQ ID NO: 102073 - protein, 9 aa, Homo sapiens
  Table A; Target 102073; HLA-B*27:05; ZNF560; ENSG00000198028; CTA
NLSSVGYQL

SEQ ID NO: 102074 - protein, 9 aa, Homo sapiens
  Table A; Target 102074; HLA-B*35:03; ZNF560; ENSG00000198028; CTA
NLSSVGYQL

SEQ ID NO: 102075 - protein, 9 aa, Homo sapiens
  Table A; Target 102075; HLA-B*38:01; ZNF560; ENSG00000198028; CTA
NLSSVGYQL

SEQ ID NO: 102076 - protein, 9 aa, Homo sapiens
  Table A; Target 102076; HLA-B*39:01; ZNF560; ENSG00000198028; CTA
NLSSVGYQL

SEQ ID NO: 102077 - protein, 9 aa, Homo sapiens
  Table A; Target 102077; HLA-B*55:01; ZNF560; ENSG00000198028; CTA
NLSSVGYQL

SEQ ID NO: 102078 - protein, 9 aa, Homo sapiens
  Table A; Target 102078; HLA-C*01:02; ZNF560; ENSG00000198028; CTA
NLSSVGYQL

SEQ ID NO: 102079 - protein, 9 aa, Homo sapiens
  Table A; Target 102079; HLA-C*07:04; ZNF560; ENSG00000198028; CTA
NLSSVGYQL

SEQ ID NO: 102080 - protein, 9 aa, Homo sapiens
  Table A; Target 102080; HLA-C*14:02; ZNF560; ENSG00000198028; CTA
NLSSVGYQL

SEQ ID NO: 102081 - protein, 11 aa, Homo sapiens
  Table A; Target 102081; HLA-A*29:02; ZNF560; ENSG00000198028; CTA
NLYSDVMLENY

SEQ ID NO: 102082 - protein, 11 aa, Homo sapiens
  Table A; Target 102082; HLA-A*30:02; ZNF560; ENSG00000198028; CTA
NLYSDVMLENY

SEQ ID NO: 102083 - protein, 8 aa, Homo sapiens
  Table A; Target 102083; HLA-A*01:01; ZNF560; ENSG00000198028; CTA
NTSECIQY

SEQ ID NO: 102084 - protein, 8 aa, Homo sapiens
  Table A; Target 102084; HLA-C*16:01; ZNF560; ENSG00000198028; CTA
NTSECIQY

SEQ ID NO: 102085 - protein, 8 aa, Homo sapiens
  Table A; Target 102085; HLA-C*16:02; ZNF560; ENSG00000198028; CTA
NTSECIQY

SEQ ID NO: 102086 - protein, 9 aa, Homo sapiens
  Table A; Target 102086; HLA-A*02:04; ZNF560; ENSG00000198028; CTA
NVAKVGFQL

SEQ ID NO: 102087 - protein, 9 aa, Homo sapiens
  Table A; Target 102087; HLA-A*68:01; ZNF560; ENSG00000198028; CTA
NVAKVGFQL

SEQ ID NO: 102088 - protein, 9 aa, Homo sapiens
  Table A; Target 102088; HLA-B*07:02; ZNF560; ENSG00000198028; CTA
NVAKVGFQL

SEQ ID NO: 102089 - protein, 9 aa, Homo sapiens
  Table A; Target 102089; HLA-B*35:01; ZNF560; ENSG00000198028; CTA
NVAKVGFQL

SEQ ID NO: 102090 - protein, 9 aa, Homo sapiens
  Table A; Target 102090; HLA-B*35:03; ZNF560; ENSG00000198028; CTA
NVAKVGFQL

SEQ ID NO: 102091 - protein, 9 aa, Homo sapiens
  Table A; Target 102091; HLA-C*07:06; ZNF560; ENSG00000198028; CTA
NVAKVGFQL

SEQ ID NO: 102092 - protein, 10 aa, Homo sapiens
  Table A; Target 102092; HLA-A*24:02; ZNF560; ENSG00000198028; CTA
NVAKVGFQLF

SEQ ID NO: 102093 - protein, 10 aa, Homo sapiens
  Table A; Target 102093; HLA-A*25:01; ZNF560; ENSG00000198028; CTA
NVAKVGFQLF

SEQ ID NO: 102094 - protein, 8 aa, Homo sapiens
  Table A; Target 102094; HLA-C*14:02; ZNF560; ENSG00000198028; CTA
NYENVAKV

SEQ ID NO: 102095 - protein, 10 aa, Homo sapiens
  Table A; Target 102095; HLA-A*23:01; ZNF560; ENSG00000198028; CTA
NYENVAKVGF

SEQ ID NO: 102096 - protein, 10 aa, Homo sapiens
  Table A; Target 102096; HLA-A*24:02; ZNF560; ENSG00000198028; CTA
NYENVAKVGF

SEQ ID NO: 102097 - protein, 10 aa, Homo sapiens
  Table A; Target 102097; HLA-C*04:01; ZNF560; ENSG00000198028; CTA
NYENVAKVGF

SEQ ID NO: 102098 - protein, 10 aa, Homo sapiens
  Table A; Target 102098; HLA-C*07:04; ZNF560; ENSG00000198028; CTA
NYENVAKVGF

SEQ ID NO: 102099 - protein, 10 aa, Homo sapiens
  Table A; Target 102099; HLA-C*14:02; ZNF560; ENSG00000198028; CTA
NYENVAKVGF

SEQ ID NO: 102100 - protein, 8 aa, Homo sapiens
  Table A; Target 102100; HLA-C*14:02; ZNF560; ENSG00000198028; CTA
NYKNLSSV

SEQ ID NO: 102101 - protein, 10 aa, Homo sapiens
  Table A; Target 102101; HLA-A*29:02; ZNF560; ENSG00000198028; CTA
NYKNLSSVGY

SEQ ID NO: 102102 - protein, 10 aa, Homo sapiens
  Table A; Target 102102; HLA-A*30:02; ZNF560; ENSG00000198028; CTA
NYKNLSSVGY

SEQ ID NO: 102103 - protein, 10 aa, Homo sapiens
  Table A; Target 102103; HLA-A*33:03; ZNF560; ENSG00000198028; CTA
NYKNLSSVGY

SEQ ID NO: 102104 - protein, 10 aa, Homo sapiens
  Table A; Target 102104; HLA-C*01:02; ZNF560; ENSG00000198028; CTA
NYKNLSSVGY

SEQ ID NO: 102105 - protein, 10 aa, Homo sapiens
  Table A; Target 102105; HLA-C*14:02; ZNF560; ENSG00000198028; CTA
NYKNLSSVGY

SEQ ID NO: 102106 - protein, 9 aa, Homo sapiens
  Table A; Target 102106; HLA-A*23:01; ZNF560; ENSG00000198028; CTA
QCGKVFVSF

SEQ ID NO: 102107 - protein, 9 aa, Homo sapiens
  Table A; Target 102107; HLA-A*24:02; ZNF560; ENSG00000198028; CTA
QCGKVFVSF

SEQ ID NO: 102108 - protein, 9 aa, Homo sapiens
  Table A; Target 102108; HLA-A*32:01; ZNF560; ENSG00000198028; CTA
QCGKVFVSF

SEQ ID NO: 102109 - protein, 9 aa, Homo sapiens
  Table A; Target 102109; HLA-B*57:01; ZNF560; ENSG00000198028; CTA
QCGKVFVSF

SEQ ID NO: 102110 - protein, 10 aa, Homo sapiens
  Table A; Target 102110; HLA-A*30:02; ZNF560; ENSG00000198028; CTA
QDKSFEGTDY

SEQ ID NO: 102111 - protein, 10 aa, Homo sapiens
  Table A; Target 102111; HLA-B*15:01; ZNF560; ENSG00000198028; CTA
QDKSFEGTDY

SEQ ID NO: 102112 - protein, 10 aa, Homo sapiens
  Table A; Target 102112; HLA-B*15:03; ZNF560; ENSG00000198028; CTA
QDKSFEGTDY

SEQ ID NO: 102113 - protein, 10 aa, Homo sapiens
  Table A; Target 102113; HLA-C*04:01; ZNF560; ENSG00000198028; CTA
QDKSFEGTDY

SEQ ID NO: 102114 - protein, 10 aa, Homo sapiens
  Table A; Target 102114; HLA-C*07:01; ZNF560; ENSG00000198028; CTA
QDKSFEGTDY

SEQ ID NO: 102115 - protein, 10 aa, Homo sapiens
  Table A; Target 102115; HLA-B*44:02; ZNF560; ENSG00000198028; CTA
QLFKPSLISW

SEQ ID NO: 102116 - protein, 10 aa, Homo sapiens
  Table A; Target 102116; HLA-B*57:01; ZNF560; ENSG00000198028; CTA
QLFKPSLISW

SEQ ID NO: 102117 - protein, 10 aa, Homo sapiens
  Table A; Target 102117; HLA-A*25:01; ZNF560; ENSG00000198028; CTA
QLFKPSVISW

SEQ ID NO: 102118 - protein, 10 aa, Homo sapiens
  Table A; Target 102118; HLA-B*44:02; ZNF560; ENSG00000198028; CTA
QLFKPSVISW

SEQ ID NO: 102119 - protein, 10 aa, Homo sapiens
  Table A; Target 102119; HLA-B*44:03; ZNF560; ENSG00000198028; CTA
QLFKPSVISW

SEQ ID NO: 102120 - protein, 10 aa, Homo sapiens
  Table A; Target 102120; HLA-B*57:01; ZNF560; ENSG00000198028; CTA
QLFKPSVISW

SEQ ID NO: 102121 - protein, 10 aa, Homo sapiens
  Table A; Target 102121; HLA-A*02:07; ZNF560; ENSG00000198028; CTA
QMDLVTFDSV

SEQ ID NO: 102122 - protein, 9 aa, Homo sapiens
  Table A; Target 102122; HLA-A*25:01; ZNF560; ENSG00000198028; CTA
QSGEKLNEW

SEQ ID NO: 102123 - protein, 9 aa, Homo sapiens
  Table A; Target 102123; HLA-B*57:01; ZNF560; ENSG00000198028; CTA
QSGEKLNEW

SEQ ID NO: 102124 - protein, 9 aa, Homo sapiens
  Table A; Target 102124; HLA-B*58:01; ZNF560; ENSG00000198028; CTA
QSGEKLNEW

SEQ ID NO: 102125 - protein, 9 aa, Homo sapiens
  Table A; Target 102125; HLA-A*03:01; ZNF560; ENSG00000198028; CTA
QSYLEAHRK

SEQ ID NO: 102126 - protein, 9 aa, Homo sapiens
  Table A; Target 102126; HLA-A*03:02; ZNF560; ENSG00000198028; CTA
QSYLEAHRK

SEQ ID NO: 102127 - protein, 9 aa, Homo sapiens
  Table A; Target 102127; HLA-A*11:01; ZNF560; ENSG00000198028; CTA
QSYLEAHRK

SEQ ID NO: 102128 - protein, 9 aa, Homo sapiens
  Table A; Target 102128; HLA-A*01:01; ZNF560; ENSG00000198028; CTA
QTHIGIKPY

SEQ ID NO: 102129 - protein, 9 aa, Homo sapiens
  Table A; Target 102129; HLA-A*30:02; ZNF560; ENSG00000198028; CTA
QTHIGIKPY

SEQ ID NO: 102130 - protein, 9 aa, Homo sapiens
  Table A; Target 102130; HLA-C*07:01; ZNF560; ENSG00000198028; CTA
QTHIGIKPY

SEQ ID NO: 102131 - protein, 9 aa, Homo sapiens
  Table A; Target 102131; HLA-C*16:02; ZNF560; ENSG00000198028; CTA
QTHIGIKPY

SEQ ID NO: 102132 - protein, 9 aa, Homo sapiens
  Table A; Target 102132; HLA-A*23:01; ZNF560; ENSG00000198028; CTA
QYAKDLLSL

SEQ ID NO: 102133 - protein, 9 aa, Homo sapiens
  Table A; Target 102133; HLA-A*24:02; ZNF560; ENSG00000198028; CTA
QYAKDLLSL

SEQ ID NO: 102134 - protein, 9 aa, Homo sapiens
  Table A; Target 102134; HLA-C*14:02; ZNF560; ENSG00000198028; CTA
QYAKDLLSL

SEQ ID NO: 102135 - protein, 10 aa, Homo sapiens
  Table A; Target 102135; HLA-A*29:02; ZNF560; ENSG00000198028; CTA
QYAKDLLSLY

SEQ ID NO: 102136 - protein, 10 aa, Homo sapiens
  Table A; Target 102136; HLA-A*30:02; ZNF560; ENSG00000198028; CTA
QYAKDLLSLY

SEQ ID NO: 102137 - protein, 10 aa, Homo sapiens
  Table A; Target 102137; HLA-A*30:02; ZNF560; ENSG00000198028; CTA
RGNTSECIQY

SEQ ID NO: 102138 - protein, 10 aa, Homo sapiens
  Table A; Target 102138; HLA-A*03:01; ZNF560; ENSG00000198028; CTA
RIHTGEKPYK

SEQ ID NO: 102139 - protein, 10 aa, Homo sapiens
  Table A; Target 102139; HLA-A*03:02; ZNF560; ENSG00000198028; CTA
RIHTGEKPYK

SEQ ID NO: 102140 - protein, 10 aa, Homo sapiens
  Table A; Target 102140; HLA-A*03:01; ZNF560; ENSG00000198028; CTA
RLILNVQVQR

SEQ ID NO: 102141 - protein, 10 aa, Homo sapiens
  Table A; Target 102141; HLA-A*31:01; ZNF560; ENSG00000198028; CTA
RLILNVQVQR

SEQ ID NO: 102142 - protein, 11 aa, Homo sapiens
  Table A; Target 102142; HLA-A*03:01; ZNF560; ENSG00000198028; CTA
RLILNVQVQRK

SEQ ID NO: 102143 - protein, 11 aa, Homo sapiens
  Table A; Target 102143; HLA-A*03:02; ZNF560; ENSG00000198028; CTA
RLILNVQVQRK

SEQ ID NO: 102144 - protein, 9 aa, Homo sapiens
  Table A; Target 102144; HLA-A*03:01; ZNF560; ENSG00000198028; CTA
RLKTLTKIK

SEQ ID NO: 102145 - protein, 9 aa, Homo sapiens
  Table A; Target 102145; HLA-A*30:02; ZNF560; ENSG00000198028; CTA
RNQNGEELY

SEQ ID NO: 102146 - protein, 9 aa, Homo sapiens
  Table A; Target 102146; HLA-B*58:01; ZNF560; ENSG00000198028; CTA
RSCVLTQHL

SEQ ID NO: 102147 - protein, 9 aa, Homo sapiens
  Table A; Target 102147; HLA-A*31:01; ZNF560; ENSG00000198028; CTA
RSDLTKHLR

SEQ ID NO: 102148 - protein, 9 aa, Homo sapiens
  Table A; Target 102148; HLA-A*32:01; ZNF560; ENSG00000198028; CTA
RSNTGQKRF

SEQ ID NO: 102149 - protein, 9 aa, Homo sapiens
  Table A; Target 102149; HLA-B*57:01; ZNF560; ENSG00000198028; CTA
RSNTGQKRF

SEQ ID NO: 102150 - protein, 9 aa, Homo sapiens
  Table A; Target 102150; HLA-B*58:01; ZNF560; ENSG00000198028; CTA
RSNTGQKRF

SEQ ID NO: 102151 - protein, 9 aa, Homo sapiens
  Table A; Target 102151; HLA-A*03:01; ZNF560; ENSG00000198028; CTA
RSYLTKHLR

SEQ ID NO: 102152 - protein, 9 aa, Homo sapiens
  Table A; Target 102152; HLA-A*31:01; ZNF560; ENSG00000198028; CTA
RSYLTKHLR

SEQ ID NO: 102153 - protein, 9 aa, Homo sapiens
  Table A; Target 102153; HLA-B*57:01; ZNF560; ENSG00000198028; CTA
RSYLTKHLR

SEQ ID NO: 102154 - protein, 9 aa, Homo sapiens
  Table A; Target 102154; HLA-A*30:02; ZNF560; ENSG00000198028; CTA
RTHTEERLY

SEQ ID NO: 102155 - protein, 9 aa, Homo sapiens
  Table A; Target 102155; HLA-B*57:01; ZNF560; ENSG00000198028; CTA
RTHTEERLY

SEQ ID NO: 102156 - protein, 9 aa, Homo sapiens
  Table A; Target 102156; HLA-B*57:01; ZNF560; ENSG00000198028; CTA
RTHTGEKPF

SEQ ID NO: 102157 - protein, 10 aa, Homo sapiens
  Table A; Target 102157; HLA-A*03:02; ZNF560; ENSG00000198028; CTA
RTHTGEKPFK

SEQ ID NO: 102158 - protein, 9 aa, Homo sapiens
  Table A; Target 102158; HLA-B*57:01; ZNF560; ENSG00000198028; CTA
RTHTGYKPY

SEQ ID NO: 102159 - protein, 10 aa, Homo sapiens
  Table A; Target 102159; HLA-A*03:01; ZNF560; ENSG00000198028; CTA
RTHTGYKPYK

SEQ ID NO: 102160 - protein, 11 aa, Homo sapiens
  Table A; Target 102160; HLA-A*31:01; ZNF560; ENSG00000198028; CTA
RTLQQGVLQDW

SEQ ID NO: 102161 - protein, 11 aa, Homo sapiens
  Table A; Target 102161; HLA-B*58:01; ZNF560; ENSG00000198028; CTA
RTLQQGVLQDW

SEQ ID NO: 102162 - protein, 9 aa, Homo sapiens
  Table A; Target 102162; HLA-A*30:02; ZNF560; ENSG00000198028; CTA
RVHNGEKPY

SEQ ID NO: 102163 - protein, 10 aa, Homo sapiens
  Table A; Target 102163; HLA-A*24:02; ZNF560; ENSG00000198028; CTA
RYPTHLNNHM

SEQ ID NO: 102164 - protein, 9 aa, Homo sapiens
  Table A; Target 102164; HLA-A*33:03; ZNF560; ENSG00000198028; CTA
SAGLIEHIR

SEQ ID NO: 102165 - protein, 9 aa, Homo sapiens
  Table A; Target 102165; HLA-A*68:01; ZNF560; ENSG00000198028; CTA
SAGLIEHIR

SEQ ID NO: 102166 - protein, 9 aa, Homo sapiens
  Table A; Target 102166; HLA-B*57:01; ZNF560; ENSG00000198028; CTA
SAGLIEHIR

SEQ ID NO: 102167 - protein, 9 aa, Homo sapiens
  Table A; Target 102167; HLA-C*07:06; ZNF560; ENSG00000198028; CTA
SAGLIEHIR

SEQ ID NO: 102168 - protein, 8 aa, Homo sapiens
  Table A; Target 102168; HLA-B*57:01; ZNF560; ENSG00000198028; CTA
SALQQEFW

SEQ ID NO: 102169 - protein, 8 aa, Homo sapiens
  Table A; Target 102169; HLA-B*58:01; ZNF560; ENSG00000198028; CTA
SALQQEFW

SEQ ID NO: 102170 - protein, 9 aa, Homo sapiens
  Table A; Target 102170; HLA-A*11:01; ZNF560; ENSG00000198028; CTA
SCVLTQHLK

SEQ ID NO: 102171 - protein, 9 aa, Homo sapiens
  Table A; Target 102171; HLA-B*37:01; ZNF560; ENSG00000198028; CTA
SDLTNHVRI

SEQ ID NO: 102172 - protein, 8 aa, Homo sapiens
  Table A; Target 102172; HLA-B*18:01; ZNF560; ENSG00000198028; CTA
SDVMLENY

SEQ ID NO: 102173 - protein, 8 aa, Homo sapiens
  Table A; Target 102173; HLA-B*37:01; ZNF560; ENSG00000198028; CTA
SDVMLENY

SEQ ID NO: 102174 - protein, 8 aa, Homo sapiens
  Table A; Target 102174; HLA-C*04:01; ZNF560; ENSG00000198028; CTA
SDVMLENY

SEQ ID NO: 102175 - protein, 8 aa, Homo sapiens
  Table A; Target 102175; HLA-C*07:01; ZNF560; ENSG00000198028; CTA
SDVMLENY

SEQ ID NO: 102176 - protein, 10 aa, Homo sapiens
  Table A; Target 102176; HLA-B*44:03; ZNF560; ENSG00000198028; CTA
SECNACGNSF

SEQ ID NO: 102177 - protein, 10 aa, Homo sapiens
  Table A; Target 102177; HLA-C*16:04; ZNF560; ENSG00000198028; CTA
SECNACGNSF

SEQ ID NO: 102178 - protein, 9 aa, Homo sapiens
  Table A; Target 102178; HLA-B*08:01; ZNF560; ENSG00000198028; CTA
SFSARIAHL

SEQ ID NO: 102179 - protein, 9 aa, Homo sapiens
  Table A; Target 102179; HLA-B*37:01; ZNF560; ENSG00000198028; CTA
SFSARIAHL

SEQ ID NO: 102180 - protein, 9 aa, Homo sapiens
  Table A; Target 102180; HLA-C*16:01; ZNF560; ENSG00000198028; CTA
SFSARIAHL

SEQ ID NO: 102181 - protein, 9 aa, Homo sapiens
  Table A; Target 102181; HLA-A*23:01; ZNF560; ENSG00000198028; CTA
SFSSLFAHL

SEQ ID NO: 102182 - protein, 9 aa, Homo sapiens
  Table A; Target 102182; HLA-A*24:02; ZNF560; ENSG00000198028; CTA
SFSSLFAHL

SEQ ID NO: 102183 - protein, 9 aa, Homo sapiens
  Table A; Target 102183; HLA-A*29:02; ZNF560; ENSG00000198028; CTA
SFSSLFAHL

SEQ ID NO: 102184 - protein, 9 aa, Homo sapiens
  Table A; Target 102184; HLA-B*38:01; ZNF560; ENSG00000198028; CTA
SHAVNVETH

SEQ ID NO: 102185 - protein, 9 aa, Homo sapiens
  Table A; Target 102185; HLA-B*39:01; ZNF560; ENSG00000198028; CTA
SHAVNVETH

SEQ ID NO: 102186 - protein, 10 aa, Homo sapiens
  Table A; Target 102186; HLA-B*38:01; ZNF560; ENSG00000198028; CTA
SHAVNVETHI

SEQ ID NO: 102187 - protein, 11 aa, Homo sapiens
  Table A; Target 102187; HLA-B*38:01; ZNF560; ENSG00000198028; CTA
SHAVNVETHII

SEQ ID NO: 102188 - protein, 9 aa, Homo sapiens
  Table A; Target 102188; HLA-A*02:03; ZNF560; ENSG00000198028; CTA
SLFAHLRTH

SEQ ID NO: 102189 - protein, 9 aa, Homo sapiens
  Table A; Target 102189; HLA-A*03:01; ZNF560; ENSG00000198028; CTA
SLFAHLRTH

SEQ ID NO: 102190 - protein, 8 aa, Homo sapiens
  Table A; Target 102190; HLA-B*08:01; ZNF560; ENSG00000198028; CTA
SLYNKTST

SEQ ID NO: 102191 - protein, 9 aa, Homo sapiens
  Table A; Target 102191; HLA-A*02:01; ZNF560; ENSG00000198028; CTA
SLYNKTSTI

SEQ ID NO: 102192 - protein, 9 aa, Homo sapiens
  Table A; Target 102192; HLA-A*02:03; ZNF560; ENSG00000198028; CTA
SLYNKTSTI

SEQ ID NO: 102193 - protein, 9 aa, Homo sapiens
  Table A; Target 102193; HLA-A*02:04; ZNF560; ENSG00000198028; CTA
SLYNKTSTI

SEQ ID NO: 102194 - protein, 9 aa, Homo sapiens
  Table A; Target 102194; HLA-A*02:07; ZNF560; ENSG00000198028; CTA
SLYNKTSTI

SEQ ID NO: 102195 - protein, 9 aa, Homo sapiens
  Table A; Target 102195; HLA-A*03:01; ZNF560; ENSG00000198028; CTA
SLYNKTSTI

SEQ ID NO: 102196 - protein, 9 aa, Homo sapiens
  Table A; Target 102196; HLA-A*23:01; ZNF560; ENSG00000198028; CTA
SLYNKTSTI

SEQ ID NO: 102197 - protein, 9 aa, Homo sapiens
  Table A; Target 102197; HLA-A*25:01; ZNF560; ENSG00000198028; CTA
SLYNKTSTI

SEQ ID NO: 102198 - protein, 9 aa, Homo sapiens
  Table A; Target 102198; HLA-A*30:01; ZNF560; ENSG00000198028; CTA
SLYNKTSTI

SEQ ID NO: 102199 - protein, 9 aa, Homo sapiens
  Table A; Target 102199; HLA-A*32:01; ZNF560; ENSG00000198028; CTA
SLYNKTSTI

SEQ ID NO: 102200 - protein, 9 aa, Homo sapiens
  Table A; Target 102200; HLA-B*08:01; ZNF560; ENSG00000198028; CTA
SLYNKTSTI

SEQ ID NO: 102201 - protein, 9 aa, Homo sapiens
  Table A; Target 102201; HLA-B*13:02; ZNF560; ENSG00000198028; CTA
SLYNKTSTI

SEQ ID NO: 102202 - protein, 9 aa, Homo sapiens
  Table A; Target 102202; HLA-B*15:01; ZNF560; ENSG00000198028; CTA
SLYNKTSTI

SEQ ID NO: 102203 - protein, 9 aa, Homo sapiens
  Table A; Target 102203; HLA-B*15:03; ZNF560; ENSG00000198028; CTA
SLYNKTSTI

SEQ ID NO: 102204 - protein, 9 aa, Homo sapiens
  Table A; Target 102204; HLA-B*46:01; ZNF560; ENSG00000198028; CTA
SLYNKTSTI

SEQ ID NO: 102205 - protein, 9 aa, Homo sapiens
  Table A; Target 102205; HLA-B*49:01; ZNF560; ENSG00000198028; CTA
SLYNKTSTI

SEQ ID NO: 102206 - protein, 9 aa, Homo sapiens
  Table A; Target 102206; HLA-B*51:01; ZNF560; ENSG00000198028; CTA
SLYNKTSTI

SEQ ID NO: 102207 - protein, 9 aa, Homo sapiens
  Table A; Target 102207; HLA-B*55:01; ZNF560; ENSG00000198028; CTA
SLYNKTSTI

SEQ ID NO: 102208 - protein, 9 aa, Homo sapiens
  Table A; Target 102208; HLA-C*01:02; ZNF560; ENSG00000198028; CTA
SLYNKTSTI

SEQ ID NO: 102209 - protein, 9 aa, Homo sapiens
  Table A; Target 102209; HLA-C*02:02; ZNF560; ENSG00000198028; CTA
SLYNKTSTI

SEQ ID NO: 102210 - protein, 9 aa, Homo sapiens
  Table A; Target 102210; HLA-C*05:01; ZNF560; ENSG00000198028; CTA
SLYNKTSTI

SEQ ID NO: 102211 - protein, 9 aa, Homo sapiens
  Table A; Target 102211; HLA-C*12:03; ZNF560; ENSG00000198028; CTA
SLYNKTSTI

SEQ ID NO: 102212 - protein, 9 aa, Homo sapiens
  Table A; Target 102212; HLA-C*14:02; ZNF560; ENSG00000198028; CTA
SLYNKTSTI

SEQ ID NO: 102213 - protein, 10 aa, Homo sapiens
  Table A; Target 102213; HLA-A*03:01; ZNF560; ENSG00000198028; CTA
SLYNKTSTIR

SEQ ID NO: 102214 - protein, 11 aa, Homo sapiens
  Table A; Target 102214; HLA-A*03:01; ZNF560; ENSG00000198028; CTA
SLYNKTSTIRK

SEQ ID NO: 102215 - protein, 11 aa, Homo sapiens
  Table A; Target 102215; HLA-A*03:02; ZNF560; ENSG00000198028; CTA
SLYNKTSTIRK

SEQ ID NO: 102216 - protein, 11 aa, Homo sapiens
  Table A; Target 102216; HLA-A*11:01; ZNF560; ENSG00000198028; CTA
SLYNKTSTIRK

SEQ ID NO: 102217 - protein, 9 aa, Homo sapiens
  Table A; Target 102217; HLA-C*07:06; ZNF560; ENSG00000198028; CTA
SSGVIEDRR

SEQ ID NO: 102218 - protein, 8 aa, Homo sapiens
  Table A; Target 102218; HLA-A*31:01; ZNF560; ENSG00000198028; CTA
SSLFAHLR

SEQ ID NO: 102219 - protein, 9 aa, Homo sapiens
  Table A; Target 102219; HLA-A*31:01; ZNF560; ENSG00000198028; CTA
SSSLVDHLR

SEQ ID NO: 102220 - protein, 9 aa, Homo sapiens
  Table A; Target 102220; HLA-A*68:01; ZNF560; ENSG00000198028; CTA
SSSLVDHLR

SEQ ID NO: 102221 - protein, 9 aa, Homo sapiens
  Table A; Target 102221; HLA-C*07:06; ZNF560; ENSG00000198028; CTA
SSSLVDHLR

SEQ ID NO: 102222 - protein, 9 aa, Homo sapiens
  Table A; Target 102222; HLA-A*03:01; ZNF560; ENSG00000198028; CTA
SSVGYQLFK

SEQ ID NO: 102223 - protein, 9 aa, Homo sapiens
  Table A; Target 102223; HLA-A*03:02; ZNF560; ENSG00000198028; CTA
SSVGYQLFK

SEQ ID NO: 102224 - protein, 9 aa, Homo sapiens
  Table A; Target 102224; HLA-C*07:06; ZNF560; ENSG00000198028; CTA
SSVGYQLFK

SEQ ID NO: 102225 - protein, 8 aa, Homo sapiens
  Table A; Target 102225; HLA-B*08:01; ZNF560; ENSG00000198028; CTA
STIRKVSV

SEQ ID NO: 102226 - protein, 9 aa, Homo sapiens
  Table A; Target 102226; HLA-A*24:02; ZNF560; ENSG00000198028; CTA
STIRKVSVF

SEQ ID NO: 102227 - protein, 9 aa, Homo sapiens
  Table A; Target 102227; HLA-A*25:01; ZNF560; ENSG00000198028; CTA
STIRKVSVF

SEQ ID NO: 102228 - protein, 9 aa, Homo sapiens
  Table A; Target 102228; HLA-A*26:01; ZNF560; ENSG00000198028; CTA
STIRKVSVF

SEQ ID NO: 102229 - protein, 9 aa, Homo sapiens
  Table A; Target 102229; HLA-A*32:01; ZNF560; ENSG00000198028; CTA
STIRKVSVF

SEQ ID NO: 102230 - protein, 9 aa, Homo sapiens
  Table A; Target 102230; HLA-B*08:01; ZNF560; ENSG00000198028; CTA
STIRKVSVF

SEQ ID NO: 102231 - protein, 9 aa, Homo sapiens
  Table A; Target 102231; HLA-B*15:01; ZNF560; ENSG00000198028; CTA
STIRKVSVF

SEQ ID NO: 102232 - protein, 9 aa, Homo sapiens
  Table A; Target 102232; HLA-B*44:02; ZNF560; ENSG00000198028; CTA
STIRKVSVF

SEQ ID NO: 102233 - protein, 9 aa, Homo sapiens
  Table A; Target 102233; HLA-B*44:03; ZNF560; ENSG00000198028; CTA
STIRKVSVF

SEQ ID NO: 102234 - protein, 9 aa, Homo sapiens
  Table A; Target 102234; HLA-B*46:01; ZNF560; ENSG00000198028; CTA
STIRKVSVF

SEQ ID NO: 102235 - protein, 9 aa, Homo sapiens
  Table A; Target 102235; HLA-B*57:01; ZNF560; ENSG00000198028; CTA
STIRKVSVF

SEQ ID NO: 102236 - protein, 9 aa, Homo sapiens
  Table A; Target 102236; HLA-B*58:01; ZNF560; ENSG00000198028; CTA
STIRKVSVF

SEQ ID NO: 102237 - protein, 9 aa, Homo sapiens
  Table A; Target 102237; HLA-C*02:02; ZNF560; ENSG00000198028; CTA
STIRKVSVF

SEQ ID NO: 102238 - protein, 9 aa, Homo sapiens
  Table A; Target 102238; HLA-C*12:03; ZNF560; ENSG00000198028; CTA
STIRKVSVF

SEQ ID NO: 102239 - protein, 9 aa, Homo sapiens
  Table A; Target 102239; HLA-C*16:01; ZNF560; ENSG00000198028; CTA
STIRKVSVF

SEQ ID NO: 102240 - protein, 11 aa, Homo sapiens
  Table A; Target 102240; HLA-A*11:01; ZNF560; ENSG00000198028; CTA
STIRKVSVFSK

SEQ ID NO: 102241 - protein, 10 aa, Homo sapiens
  Table A; Target 102241; HLA-A*24:02; ZNF560; ENSG00000198028; CTA
STLPRVLQEW

SEQ ID NO: 102242 - protein, 10 aa, Homo sapiens
  Table A; Target 102242; HLA-A*25:01; ZNF560; ENSG00000198028; CTA
STLPRVLQEW

SEQ ID NO: 102243 - protein, 10 aa, Homo sapiens
  Table A; Target 102243; HLA-A*31:01; ZNF560; ENSG00000198028; CTA
STLPRVLQEW

SEQ ID NO: 102244 - protein, 10 aa, Homo sapiens
  Table A; Target 102244; HLA-A*32:01; ZNF560; ENSG00000198028; CTA
STLPRVLQEW

SEQ ID NO: 102245 - protein, 10 aa, Homo sapiens
  Table A; Target 102245; HLA-B*44:02; ZNF560; ENSG00000198028; CTA
STLPRVLQEW

SEQ ID NO: 102246 - protein, 10 aa, Homo sapiens
  Table A; Target 102246; HLA-B*58:01; ZNF560; ENSG00000198028; CTA
STLPRVLQEW

SEQ ID NO: 102247 - protein, 11 aa, Homo sapiens
  Table A; Target 102247; HLA-A*25:01; ZNF560; ENSG00000198028; CTA
SVAVEFTQEEW

SEQ ID NO: 102248 - protein, 11 aa, Homo sapiens
  Table A; Target 102248; HLA-B*57:01; ZNF560; ENSG00000198028; CTA
SVAVEFTQEEW

SEQ ID NO: 102249 - protein, 8 aa, Homo sapiens
  Table A; Target 102249; HLA-A*03:01; ZNF560; ENSG00000198028; CTA
SVGYQLFK

SEQ ID NO: 102250 - protein, 8 aa, Homo sapiens
  Table A; Target 102250; HLA-A*11:01; ZNF560; ENSG00000198028; CTA
SVGYQLFK

SEQ ID NO: 102251 - protein, 9 aa, Homo sapiens
  Table A; Target 102251; HLA-A*26:01; ZNF560; ENSG00000198028; CTA
SVSALQQEF

SEQ ID NO: 102252 - protein, 9 aa, Homo sapiens
  Table A; Target 102252; HLA-A*29:02; ZNF560; ENSG00000198028; CTA
SVSALQQEF

SEQ ID NO: 102253 - protein, 9 aa, Homo sapiens
  Table A; Target 102253; HLA-A*30:02; ZNF560; ENSG00000198028; CTA
SVSALQQEF

SEQ ID NO: 102254 - protein, 9 aa, Homo sapiens
  Table A; Target 102254; HLA-A*32:01; ZNF560; ENSG00000198028; CTA
SVSALQQEF

SEQ ID NO: 102255 - protein, 9 aa, Homo sapiens
  Table A; Target 102255; HLA-B*15:01; ZNF560; ENSG00000198028; CTA
SVSALQQEF

SEQ ID NO: 102256 - protein, 9 aa, Homo sapiens
  Table A; Target 102256; HLA-B*15:03; ZNF560; ENSG00000198028; CTA
SVSALQQEF

SEQ ID NO: 102257 - protein, 9 aa, Homo sapiens
  Table A; Target 102257; HLA-B*35:01; ZNF560; ENSG00000198028; CTA
SVSALQQEF

SEQ ID NO: 102258 - protein, 9 aa, Homo sapiens
  Table A; Target 102258; HLA-B*58:01; ZNF560; ENSG00000198028; CTA
SVSALQQEF

SEQ ID NO: 102259 - protein, 9 aa, Homo sapiens
  Table A; Target 102259; HLA-C*02:02; ZNF560; ENSG00000198028; CTA
SVSALQQEF

SEQ ID NO: 102260 - protein, 9 aa, Homo sapiens
  Table A; Target 102260; HLA-C*07:04; ZNF560; ENSG00000198028; CTA
SVSALQQEF

SEQ ID NO: 102261 - protein, 9 aa, Homo sapiens
  Table A; Target 102261; HLA-C*07:06; ZNF560; ENSG00000198028; CTA
SVSALQQEF

SEQ ID NO: 102262 - protein, 9 aa, Homo sapiens
  Table A; Target 102262; HLA-C*16:01; ZNF560; ENSG00000198028; CTA
SVSALQQEF

SEQ ID NO: 102263 - protein, 9 aa, Homo sapiens
  Table A; Target 102263; HLA-C*16:04; ZNF560; ENSG00000198028; CTA
SVSALQQEF

SEQ ID NO: 102264 - protein, 10 aa, Homo sapiens
  Table A; Target 102264; HLA-A*25:01; ZNF560; ENSG00000198028; CTA
SVSALQQEFW

SEQ ID NO: 102265 - protein, 10 aa, Homo sapiens
  Table A; Target 102265; HLA-B*57:01; ZNF560; ENSG00000198028; CTA
SVSALQQEFW

SEQ ID NO: 102266 - protein, 10 aa, Homo sapiens
  Table A; Target 102266; HLA-B*58:01; ZNF560; ENSG00000198028; CTA
SVSALQQEFW

SEQ ID NO: 102267 - protein, 9 aa, Homo sapiens
  Table A; Target 102267; HLA-B*35:03; ZNF560; ENSG00000198028; CTA
SVTFEDTAV

SEQ ID NO: 102268 - protein, 9 aa, Homo sapiens
  Table A; Target 102268; HLA-B*55:01; ZNF560; ENSG00000198028; CTA
SVTFEDTAV

SEQ ID NO: 102269 - protein, 9 aa, Homo sapiens
  Table A; Target 102269; HLA-A*31:01; ZNF560; ENSG00000198028; CTA
SYLTKHLRR

SEQ ID NO: 102270 - protein, 9 aa, Homo sapiens
  Table A; Target 102270; HLA-A*23:01; ZNF560; ENSG00000198028; CTA
SYPSLFGHL

SEQ ID NO: 102271 - protein, 9 aa, Homo sapiens
  Table A; Target 102271; HLA-A*24:02; ZNF560; ENSG00000198028; CTA
SYPSLFGHL

SEQ ID NO: 102272 - protein, 9 aa, Homo sapiens
  Table A; Target 102272; HLA-A*29:02; ZNF560; ENSG00000198028; CTA
SYPSLFGHL

SEQ ID NO: 102273 - protein, 10 aa, Homo sapiens
  Table A; Target 102273; HLA-A*29:02; ZNF560; ENSG00000198028; CTA
SYPSLFGHLR

SEQ ID NO: 102274 - protein, 10 aa, Homo sapiens
  Table A; Target 102274; HLA-A*31:01; ZNF560; ENSG00000198028; CTA
SYPSLFGHLR

SEQ ID NO: 102275 - protein, 10 aa, Homo sapiens
  Table A; Target 102275; HLA-A*25:01; ZNF560; ENSG00000198028; CTA
TAVDFTQEEW

SEQ ID NO: 102276 - protein, 10 aa, Homo sapiens
  Table A; Target 102276; HLA-A*26:01; ZNF560; ENSG00000198028; CTA
TAVDFTQEEW

SEQ ID NO: 102277 - protein, 10 aa, Homo sapiens
  Table A; Target 102277; HLA-A*68:01; ZNF560; ENSG00000198028; CTA
TAVDFTQEEW

SEQ ID NO: 102278 - protein, 10 aa, Homo sapiens
  Table A; Target 102278; HLA-B*27:02; ZNF560; ENSG00000198028; CTA
TAVDFTQEEW

SEQ ID NO: 102279 - protein, 10 aa, Homo sapiens
  Table A; Target 102279; HLA-B*35:01; ZNF560; ENSG00000198028; CTA
TAVDFTQEEW

SEQ ID NO: 102280 - protein, 10 aa, Homo sapiens
  Table A; Target 102280; HLA-B*44:03; ZNF560; ENSG00000198028; CTA
TAVDFTQEEW

SEQ ID NO: 102281 - protein, 10 aa, Homo sapiens
  Table A; Target 102281; HLA-B*57:01; ZNF560; ENSG00000198028; CTA
TAVDFTQEEW

SEQ ID NO: 102282 - protein, 10 aa, Homo sapiens
  Table A; Target 102282; HLA-B*58:01; ZNF560; ENSG00000198028; CTA
TAVDFTQEEW

SEQ ID NO: 102283 - protein, 10 aa, Homo sapiens
  Table A; Target 102283; HLA-C*07:06; ZNF560; ENSG00000198028; CTA
TAVDFTQEEW

SEQ ID NO: 102284 - protein, 10 aa, Homo sapiens
  Table A; Target 102284; HLA-C*16:04; ZNF560; ENSG00000198028; CTA
TAVDFTQEEW

SEQ ID NO: 102285 - protein, 9 aa, Homo sapiens
  Table A; Target 102285; HLA-A*29:02; ZNF560; ENSG00000198028; CTA
TDYGKAFIY

SEQ ID NO: 102286 - protein, 9 aa, Homo sapiens
  Table A; Target 102286; HLA-B*18:01; ZNF560; ENSG00000198028; CTA
TDYGKAFIY

SEQ ID NO: 102287 - protein, 9 aa, Homo sapiens
  Table A; Target 102287; HLA-B*35:01; ZNF560; ENSG00000198028; CTA
TDYGKAFIY

SEQ ID NO: 102288 - protein, 9 aa, Homo sapiens
  Table A; Target 102288; HLA-B*37:01; ZNF560; ENSG00000198028; CTA
TDYGKAFIY

SEQ ID NO: 102289 - protein, 9 aa, Homo sapiens
  Table A; Target 102289; HLA-B*44:02; ZNF560; ENSG00000198028; CTA
TDYGKAFIY

SEQ ID NO: 102290 - protein, 9 aa, Homo sapiens
  Table A; Target 102290; HLA-B*44:03; ZNF560; ENSG00000198028; CTA
TDYGKAFIY

SEQ ID NO: 102291 - protein, 9 aa, Homo sapiens
  Table A; Target 102291; HLA-C*07:01; ZNF560; ENSG00000198028; CTA
TDYGKAFIY

SEQ ID NO: 102292 - protein, 9 aa, Homo sapiens
  Table A; Target 102292; HLA-A*02:07; ZNF560; ENSG00000198028; CTA
TFDSVAVEF

SEQ ID NO: 102293 - protein, 9 aa, Homo sapiens
  Table A; Target 102293; HLA-A*23:01; ZNF560; ENSG00000198028; CTA
TFDSVAVEF

SEQ ID NO: 102294 - protein, 9 aa, Homo sapiens
  Table A; Target 102294; HLA-A*24:02; ZNF560; ENSG00000198028; CTA
TFDSVAVEF

SEQ ID NO: 102295 - protein, 9 aa, Homo sapiens
  Table A; Target 102295; HLA-A*29:02; ZNF560; ENSG00000198028; CTA
TFDSVAVEF

SEQ ID NO: 102296 - protein, 9 aa, Homo sapiens
  Table A; Target 102296; HLA-A*32:01; ZNF560; ENSG00000198028; CTA
TFDSVAVEF

SEQ ID NO: 102297 - protein, 9 aa, Homo sapiens
  Table A; Target 102297; HLA-A*33:03; ZNF560; ENSG00000198028; CTA
TFDSVAVEF

SEQ ID NO: 102298 - protein, 9 aa, Homo sapiens
  Table A; Target 102298; HLA-B*18:01; ZNF560; ENSG00000198028; CTA
TFDSVAVEF

SEQ ID NO: 102299 - protein, 9 aa, Homo sapiens
  Table A; Target 102299; HLA-B*35:03; ZNF560; ENSG00000198028; CTA
TFDSVAVEF

SEQ ID NO: 102300 - protein, 9 aa, Homo sapiens
  Table A; Target 102300; HLA-B*38:01; ZNF560; ENSG00000198028; CTA
TFDSVAVEF

SEQ ID NO: 102301 - protein, 9 aa, Homo sapiens
  Table A; Target 102301; HLA-C*01:02; ZNF560; ENSG00000198028; CTA
TFDSVAVEF

SEQ ID NO: 102302 - protein, 9 aa, Homo sapiens
  Table A; Target 102302; HLA-C*05:01; ZNF560; ENSG00000198028; CTA
TFDSVAVEF

SEQ ID NO: 102303 - protein, 9 aa, Homo sapiens
  Table A; Target 102303; HLA-C*07:04; ZNF560; ENSG00000198028; CTA
TFDSVAVEF

SEQ ID NO: 102304 - protein, 9 aa, Homo sapiens
  Table A; Target 102304; HLA-C*14:02; ZNF560; ENSG00000198028; CTA
TFDSVAVEF

SEQ ID NO: 102305 - protein, 9 aa, Homo sapiens
  Table A; Target 102305; HLA-A*23:01; ZNF560; ENSG00000198028; CTA
TFEDTAVDF

SEQ ID NO: 102306 - protein, 9 aa, Homo sapiens
  Table A; Target 102306; HLA-B*35:01; ZNF560; ENSG00000198028; CTA
TFEDTAVDF

SEQ ID NO: 102307 - protein, 9 aa, Homo sapiens
  Table A; Target 102307; HLA-B*35:03; ZNF560; ENSG00000198028; CTA
TFEDTAVDF

SEQ ID NO: 102308 - protein, 9 aa, Homo sapiens
  Table A; Target 102308; HLA-C*01:02; ZNF560; ENSG00000198028; CTA
TFEDTAVDF

SEQ ID NO: 102309 - protein, 9 aa, Homo sapiens
  Table A; Target 102309; HLA-C*04:01; ZNF560; ENSG00000198028; CTA
TFEDTAVDF

SEQ ID NO: 102310 - protein, 9 aa, Homo sapiens
  Table A; Target 102310; HLA-C*07:04; ZNF560; ENSG00000198028; CTA
TFEDTAVDF

SEQ ID NO: 102311 - protein, 9 aa, Homo sapiens
  Table A; Target 102311; HLA-C*14:02; ZNF560; ENSG00000198028; CTA
TFEDTAVDF

SEQ ID NO: 102312 - protein, 8 aa, Homo sapiens
  Table A; Target 102312; HLA-C*14:02; ZNF560; ENSG00000198028; CTA
TFTVPSGF

SEQ ID NO: 102313 - protein, 8 aa, Homo sapiens
  Table A; Target 102313; HLA-A*01:01; ZNF560; ENSG00000198028; CTA
TGDKPYEY

SEQ ID NO: 102314 - protein, 8 aa, Homo sapiens
  Table A; Target 102314; HLA-B*18:01; ZNF560; ENSG00000198028; CTA
TGDKPYEY

SEQ ID NO: 102315 - protein, 8 aa, Homo sapiens
  Table A; Target 102315; HLA-B*35:01; ZNF560; ENSG00000198028; CTA
TGDKPYEY

SEQ ID NO: 102316 - protein, 8 aa, Homo sapiens
  Table A; Target 102316; HLA-C*03:03; ZNF560; ENSG00000198028; CTA
TGDKPYEY

SEQ ID NO: 102317 - protein, 8 aa, Homo sapiens
  Table A; Target 102317; HLA-C*05:01; ZNF560; ENSG00000198028; CTA
TGDKPYEY

SEQ ID NO: 102318 - protein, 9 aa, Homo sapiens
  Table A; Target 102318; HLA-A*03:02; ZNF560; ENSG00000198028; CTA
TGDKPYEYK

SEQ ID NO: 102319 - protein, 9 aa, Homo sapiens
  Table A; Target 102319; HLA-A*11:01; ZNF560; ENSG00000198028; CTA
TGDKPYEYK

SEQ ID NO: 102320 - protein, 9 aa, Homo sapiens
  Table A; Target 102320; HLA-C*07:01; ZNF560; ENSG00000198028; CTA
TGEKPFKCY

SEQ ID NO: 102321 - protein, 10 aa, Homo sapiens
  Table A; Target 102321; HLA-B*38:01; ZNF560; ENSG00000198028; CTA
THSTSHAVNV

SEQ ID NO: 102322 - protein, 8 aa, Homo sapiens
  Table A; Target 102322; HLA-B*08:01; ZNF560; ENSG00000198028; CTA
TIRKVSVF

SEQ ID NO: 102323 - protein, 10 aa, Homo sapiens
  Table A; Target 102323; HLA-A*02:01; ZNF560; ENSG00000198028; CTA
TLLDPAQRNL

SEQ ID NO: 102324 - protein, 10 aa, Homo sapiens
  Table A; Target 102324; HLA-A*02:03; ZNF560; ENSG00000198028; CTA
TLLDPAQRNL

SEQ ID NO: 102325 - protein, 10 aa, Homo sapiens
  Table A; Target 102325; HLA-A*02:04; ZNF560; ENSG00000198028; CTA
TLLDPAQRNL

SEQ ID NO: 102326 - protein, 10 aa, Homo sapiens
  Table A; Target 102326; HLA-A*03:01; ZNF560; ENSG00000198028; CTA
TLLDPAQRNL

SEQ ID NO: 102327 - protein, 11 aa, Homo sapiens
  Table A; Target 102327; HLA-A*01:01; ZNF560; ENSG00000198028; CTA
TLLDPAQRNLY

SEQ ID NO: 102328 - protein, 11 aa, Homo sapiens
  Table A; Target 102328; HLA-A*03:01; ZNF560; ENSG00000198028; CTA
TLLDPAQRNLY

SEQ ID NO: 102329 - protein, 11 aa, Homo sapiens
  Table A; Target 102329; HLA-A*23:01; ZNF560; ENSG00000198028; CTA
TLLDPAQRNLY

SEQ ID NO: 102330 - protein, 11 aa, Homo sapiens
  Table A; Target 102330; HLA-A*24:02; ZNF560; ENSG00000198028; CTA
TLLDPAQRNLY

SEQ ID NO: 102331 - protein, 11 aa, Homo sapiens
  Table A; Target 102331; HLA-A*29:02; ZNF560; ENSG00000198028; CTA
TLLDPAQRNLY

SEQ ID NO: 102332 - protein, 11 aa, Homo sapiens
  Table A; Target 102332; HLA-A*30:02; ZNF560; ENSG00000198028; CTA
TLLDPAQRNLY

SEQ ID NO: 102333 - protein, 11 aa, Homo sapiens
  Table A; Target 102333; HLA-A*31:01; ZNF560; ENSG00000198028; CTA
TLLDPAQRNLY

SEQ ID NO: 102334 - protein, 11 aa, Homo sapiens
  Table A; Target 102334; HLA-A*32:01; ZNF560; ENSG00000198028; CTA
TLLDPAQRNLY

SEQ ID NO: 102335 - protein, 11 aa, Homo sapiens
  Table A; Target 102335; HLA-B*15:01; ZNF560; ENSG00000198028; CTA
TLLDPAQRNLY

SEQ ID NO: 102336 - protein, 11 aa, Homo sapiens
  Table A; Target 102336; HLA-B*15:03; ZNF560; ENSG00000198028; CTA
TLLDPAQRNLY

SEQ ID NO: 102337 - protein, 11 aa, Homo sapiens
  Table A; Target 102337; HLA-C*07:04; ZNF560; ENSG00000198028; CTA
TLLDPAQRNLY

SEQ ID NO: 102338 - protein, 11 aa, Homo sapiens
  Table A; Target 102338; HLA-C*16:01; ZNF560; ENSG00000198028; CTA
TLLDPAQRNLY

SEQ ID NO: 102339 - protein, 9 aa, Homo sapiens
  Table A; Target 102339; HLA-A*03:01; ZNF560; ENSG00000198028; CTA
TLNGIQLAR

SEQ ID NO: 102340 - protein, 9 aa, Homo sapiens
  Table A; Target 102340; HLA-A*03:02; ZNF560; ENSG00000198028; CTA
TLNGIQLAR

SEQ ID NO: 102341 - protein, 9 aa, Homo sapiens
  Table A; Target 102341; HLA-A*11:01; ZNF560; ENSG00000198028; CTA
TLNGIQLAR

SEQ ID NO: 102342 - protein, 9 aa, Homo sapiens
  Table A; Target 102342; HLA-A*29:02; ZNF560; ENSG00000198028; CTA
TLNGIQLAR

SEQ ID NO: 102343 - protein, 9 aa, Homo sapiens
  Table A; Target 102343; HLA-A*31:01; ZNF560; ENSG00000198028; CTA
TLNGIQLAR

SEQ ID NO: 102344 - protein, 9 aa, Homo sapiens
  Table A; Target 102344; HLA-A*33:01; ZNF560; ENSG00000198028; CTA
TLNGIQLAR

SEQ ID NO: 102345 - protein, 9 aa, Homo sapiens
  Table A; Target 102345; HLA-A*33:03; ZNF560; ENSG00000198028; CTA
TLNGIQLAR

SEQ ID NO: 102346 - protein, 9 aa, Homo sapiens
  Table A; Target 102346; HLA-A*68:01; ZNF560; ENSG00000198028; CTA
TLNGIQLAR

SEQ ID NO: 102347 - protein, 9 aa, Homo sapiens
  Table A; Target 102347; HLA-C*07:06; ZNF560; ENSG00000198028; CTA
TLNGIQLAR

SEQ ID NO: 102348 - protein, 9 aa, Homo sapiens
  Table A; Target 102348; HLA-A*02:07; ZNF560; ENSG00000198028; CTA
TLPRVLQEW

SEQ ID NO: 102349 - protein, 9 aa, Homo sapiens
  Table A; Target 102349; HLA-A*24:02; ZNF560; ENSG00000198028; CTA
TLPRVLQEW

SEQ ID NO: 102350 - protein, 9 aa, Homo sapiens
  Table A; Target 102350; HLA-A*25:01; ZNF560; ENSG00000198028; CTA
TLPRVLQEW

SEQ ID NO: 102351 - protein, 9 aa, Homo sapiens
  Table A; Target 102351; HLA-B*57:01; ZNF560; ENSG00000198028; CTA
TLPRVLQEW

SEQ ID NO: 102352 - protein, 10 aa, Homo sapiens
  Table A; Target 102352; HLA-A*25:01; ZNF560; ENSG00000198028; CTA
TLQQGVLQDW

SEQ ID NO: 102353 - protein, 8 aa, Homo sapiens
  Table A; Target 102353; HLA-A*33:01; ZNF560; ENSG00000198028; CTA
TNMSTQNR

SEQ ID NO: 102354 - protein, 8 aa, Homo sapiens
  Table A; Target 102354; HLA-A*33:03; ZNF560; ENSG00000198028; CTA
TNMSTQNR

SEQ ID NO: 102355 - protein, 10 aa, Homo sapiens
  Table A; Target 102355; HLA-C*04:01; ZNF560; ENSG00000198028; CTA
TNMSTQNRGN

SEQ ID NO: 102356 - protein, 9 aa, Homo sapiens
  Table A; Target 102356; HLA-B*08:01; ZNF560; ENSG00000198028; CTA
TQHLKTHAA

SEQ ID NO: 102357 - protein, 10 aa, Homo sapiens
  Table A; Target 102357; HLA-A*25:01; ZNF560; ENSG00000198028; CTA
TQSGEKLNEW

SEQ ID NO: 102358 - protein, 10 aa, Homo sapiens
  Table A; Target 102358; HLA-B*38:01; ZNF560; ENSG00000198028; CTA
TQSGEKLNEW

SEQ ID NO: 102359 - protein, 9 aa, Homo sapiens
  Table A; Target 102359; HLA-A*68:01; ZNF560; ENSG00000198028; CTA
TSAGLIEHI

SEQ ID NO: 102360 - protein, 9 aa, Homo sapiens
  Table A; Target 102360; HLA-A*68:02; ZNF560; ENSG00000198028; CTA
TSAGLIEHI

SEQ ID NO: 102361 - protein, 9 aa, Homo sapiens
  Table A; Target 102361; HLA-B*13:02; ZNF560; ENSG00000198028; CTA
TSAGLIEHI

SEQ ID NO: 102362 - protein, 9 aa, Homo sapiens
  Table A; Target 102362; HLA-B*38:01; ZNF560; ENSG00000198028; CTA
TSAGLIEHI

SEQ ID NO: 102363 - protein, 9 aa, Homo sapiens
  Table A; Target 102363; HLA-B*58:01; ZNF560; ENSG00000198028; CTA
TSAGLIEHI

SEQ ID NO: 102364 - protein, 9 aa, Homo sapiens
  Table A; Target 102364; HLA-C*06:02; ZNF560; ENSG00000198028; CTA
TSAGLIEHI

SEQ ID NO: 102365 - protein, 9 aa, Homo sapiens
  Table A; Target 102365; HLA-C*16:02; ZNF560; ENSG00000198028; CTA
TSAGLIEHI

SEQ ID NO: 102366 - protein, 10 aa, Homo sapiens
  Table A; Target 102366; HLA-A*33:03; ZNF560; ENSG00000198028; CTA
TSAGLIEHIR

SEQ ID NO: 102367 - protein, 10 aa, Homo sapiens
  Table A; Target 102367; HLA-A*68:01; ZNF560; ENSG00000198028; CTA
TSAGLIEHIR

SEQ ID NO: 102368 - protein, 10 aa, Homo sapiens
  Table A; Target 102368; HLA-A*68:02; ZNF560; ENSG00000198028; CTA
TSAGLIEHIR

SEQ ID NO: 102369 - protein, 10 aa, Homo sapiens
  Table A; Target 102369; HLA-C*07:06; ZNF560; ENSG00000198028; CTA
TSAGLIEHIR

SEQ ID NO: 102370 - protein, 9 aa, Homo sapiens
  Table A; Target 102370; HLA-A*03:02; ZNF560; ENSG00000198028; CTA
TSECIQYAK

SEQ ID NO: 102371 - protein, 9 aa, Homo sapiens
  Table A; Target 102371; HLA-A*11:01; ZNF560; ENSG00000198028; CTA
TSECIQYAK

SEQ ID NO: 102372 - protein, 9 aa, Homo sapiens
  Table A; Target 102372; HLA-B*58:01; ZNF560; ENSG00000198028; CTA
TSHAVNVET

SEQ ID NO: 102373 - protein, 9 aa, Homo sapiens
  Table A; Target 102373; HLA-B*58:01; ZNF560; ENSG00000198028; CTA
TSNGIQMDL

SEQ ID NO: 102374 - protein, 9 aa, Homo sapiens
  Table A; Target 102374; HLA-C*01:02; ZNF560; ENSG00000198028; CTA
TSNGIQMDL

SEQ ID NO: 102375 - protein, 9 aa, Homo sapiens
  Table A; Target 102375; HLA-C*02:02; ZNF560; ENSG00000198028; CTA
TSNGIQMDL

SEQ ID NO: 102376 - protein, 9 aa, Homo sapiens
  Table A; Target 102376; HLA-C*12:03; ZNF560; ENSG00000198028; CTA
TSSGRIQHL

SEQ ID NO: 102377 - protein, 9 aa, Homo sapiens
  Table A; Target 102377; HLA-C*16:01; ZNF560; ENSG00000198028; CTA
TSSGRIQHL

SEQ ID NO: 102378 - protein, 9 aa, Homo sapiens
  Table A; Target 102378; HLA-C*16:02; ZNF560; ENSG00000198028; CTA
TSSGRIQHL

SEQ ID NO: 102379 - protein, 9 aa, Homo sapiens
  Table A; Target 102379; HLA-A*31:01; ZNF560; ENSG00000198028; CTA
TSSGVIEDR

SEQ ID NO: 102380 - protein, 9 aa, Homo sapiens
  Table A; Target 102380; HLA-A*33:03; ZNF560; ENSG00000198028; CTA
TSSGVIEDR

SEQ ID NO: 102381 - protein, 9 aa, Homo sapiens
  Table A; Target 102381; HLA-A*68:01; ZNF560; ENSG00000198028; CTA
TSSGVIEDR

SEQ ID NO: 102382 - protein, 9 aa, Homo sapiens
  Table A; Target 102382; HLA-B*27:02; ZNF560; ENSG00000198028; CTA
TSSGVIEDR

SEQ ID NO: 102383 - protein, 9 aa, Homo sapiens
  Table A; Target 102383; HLA-C*07:06; ZNF560; ENSG00000198028; CTA
TSSGVIEDR

SEQ ID NO: 102384 - protein, 10 aa, Homo sapiens
  Table A; Target 102384; HLA-A*68:01; ZNF560; ENSG00000198028; CTA
TSSGVIEDRR

SEQ ID NO: 102385 - protein, 10 aa, Homo sapiens
  Table A; Target 102385; HLA-B*27:05; ZNF560; ENSG00000198028; CTA
TSSGVIEDRR

SEQ ID NO: 102386 - protein, 10 aa, Homo sapiens
  Table A; Target 102386; HLA-C*07:06; ZNF560; ENSG00000198028; CTA
TSSGVIEDRR

SEQ ID NO: 102387 - protein, 9 aa, Homo sapiens
  Table A; Target 102387; HLA-B*08:01; ZNF560; ENSG00000198028; CTA
TSTIRKVSV

SEQ ID NO: 102388 - protein, 9 aa, Homo sapiens
  Table A; Target 102388; HLA-C*16:01; ZNF560; ENSG00000198028; CTA
TSTIRKVSV

SEQ ID NO: 102389 - protein, 9 aa, Homo sapiens
  Table A; Target 102389; HLA-C*16:02; ZNF560; ENSG00000198028; CTA
TSTIRKVSV

SEQ ID NO: 102390 - protein, 10 aa, Homo sapiens
  Table A; Target 102390; HLA-B*57:01; ZNF560; ENSG00000198028; CTA
TSVSALQQEF

SEQ ID NO: 102391 - protein, 10 aa, Homo sapiens
  Table A; Target 102391; HLA-B*58:01; ZNF560; ENSG00000198028; CTA
TSVSALQQEF

SEQ ID NO: 102392 - protein, 11 aa, Homo sapiens
  Table A; Target 102392; HLA-B*57:01; ZNF560; ENSG00000198028; CTA
TSVSALQQEFW

SEQ ID NO: 102393 - protein, 11 aa, Homo sapiens
  Table A; Target 102393; HLA-B*58:01; ZNF560; ENSG00000198028; CTA
TSVSALQQEFW

SEQ ID NO: 102394 - protein, 9 aa, Homo sapiens
  Table A; Target 102394; HLA-A*03:01; ZNF560; ENSG00000198028; CTA
TVPSGFLEH

SEQ ID NO: 102395 - protein, 9 aa, Homo sapiens
  Table A; Target 102395; HLA-A*26:01; ZNF560; ENSG00000198028; CTA
TVPSGFLEH

SEQ ID NO: 102396 - protein, 9 aa, Homo sapiens
  Table A; Target 102396; HLA-A*29:02; ZNF560; ENSG00000198028; CTA
TVPSGFLEH

SEQ ID NO: 102397 - protein, 9 aa, Homo sapiens
  Table A; Target 102397; HLA-C*01:02; ZNF560; ENSG00000198028; CTA
TVPSGFLEH

SEQ ID NO: 102398 - protein, 10 aa, Homo sapiens
  Table A; Target 102398; HLA-A*02:07; ZNF560; ENSG00000198028; CTA
TVPSGFLEHV

SEQ ID NO: 102399 - protein, 8 aa, Homo sapiens
  Table A; Target 102399; HLA-A*23:01; ZNF560; ENSG00000198028; CTA
VAKVGFQL

SEQ ID NO: 102400 - protein, 8 aa, Homo sapiens
  Table A; Target 102400; HLA-A*32:01; ZNF560; ENSG00000198028; CTA
VAKVGFQL

SEQ ID NO: 102401 - protein, 8 aa, Homo sapiens
  Table A; Target 102401; HLA-B*08:01; ZNF560; ENSG00000198028; CTA
VAKVGFQL

SEQ ID NO: 102402 - protein, 8 aa, Homo sapiens
  Table A; Target 102402; HLA-B*40:02; ZNF560; ENSG00000198028; CTA
VAKVGFQL

SEQ ID NO: 102403 - protein, 8 aa, Homo sapiens
  Table A; Target 102403; HLA-B*46:01; ZNF560; ENSG00000198028; CTA
VAKVGFQL

SEQ ID NO: 102404 - protein, 8 aa, Homo sapiens
  Table A; Target 102404; HLA-B*58:01; ZNF560; ENSG00000198028; CTA
VAKVGFQL

SEQ ID NO: 102405 - protein, 8 aa, Homo sapiens
  Table A; Target 102405; HLA-C*01:02; ZNF560; ENSG00000198028; CTA
VAKVGFQL

SEQ ID NO: 102406 - protein, 8 aa, Homo sapiens
  Table A; Target 102406; HLA-C*02:02; ZNF560; ENSG00000198028; CTA
VAKVGFQL

SEQ ID NO: 102407 - protein, 8 aa, Homo sapiens
  Table A; Target 102407; HLA-C*03:03; ZNF560; ENSG00000198028; CTA
VAKVGFQL

SEQ ID NO: 102408 - protein, 8 aa, Homo sapiens
  Table A; Target 102408; HLA-C*03:04; ZNF560; ENSG00000198028; CTA
VAKVGFQL

SEQ ID NO: 102409 - protein, 8 aa, Homo sapiens
  Table A; Target 102409; HLA-C*14:02; ZNF560; ENSG00000198028; CTA
VAKVGFQL

SEQ ID NO: 102410 - protein, 8 aa, Homo sapiens
  Table A; Target 102410; HLA-C*16:01; ZNF560; ENSG00000198028; CTA
VAKVGFQL

SEQ ID NO: 102411 - protein, 8 aa, Homo sapiens
  Table A; Target 102411; HLA-C*16:02; ZNF560; ENSG00000198028; CTA
VAKVGFQL

SEQ ID NO: 102412 - protein, 8 aa, Homo sapiens
  Table A; Target 102412; HLA-C*16:04; ZNF560; ENSG00000198028; CTA
VAKVGFQL

SEQ ID NO: 102413 - protein, 9 aa, Homo sapiens
  Table A; Target 102413; HLA-A*23:01; ZNF560; ENSG00000198028; CTA
VAKVGFQLF

SEQ ID NO: 102414 - protein, 9 aa, Homo sapiens
  Table A; Target 102414; HLA-A*24:02; ZNF560; ENSG00000198028; CTA
VAKVGFQLF

SEQ ID NO: 102415 - protein, 9 aa, Homo sapiens
  Table A; Target 102415; HLA-B*46:01; ZNF560; ENSG00000198028; CTA
VAKVGFQLF

SEQ ID NO: 102416 - protein, 9 aa, Homo sapiens
  Table A; Target 102416; HLA-B*57:01; ZNF560; ENSG00000198028; CTA
VAKVGFQLF

SEQ ID NO: 102417 - protein, 9 aa, Homo sapiens
  Table A; Target 102417; HLA-C*02:02; ZNF560; ENSG00000198028; CTA
VAKVGFQLF

SEQ ID NO: 102418 - protein, 10 aa, Homo sapiens
  Table A; Target 102418; HLA-A*25:01; ZNF560; ENSG00000198028; CTA
VAVEFTQEEW

SEQ ID NO: 102419 - protein, 10 aa, Homo sapiens
  Table A; Target 102419; HLA-B*27:02; ZNF560; ENSG00000198028; CTA
VAVEFTQEEW

SEQ ID NO: 102420 - protein, 10 aa, Homo sapiens
  Table A; Target 102420; HLA-B*46:01; ZNF560; ENSG00000198028; CTA
VAVEFTQEEW

SEQ ID NO: 102421 - protein, 10 aa, Homo sapiens
  Table A; Target 102421; HLA-B*57:01; ZNF560; ENSG00000198028; CTA
VAVEFTQEEW

SEQ ID NO: 102422 - protein, 10 aa, Homo sapiens
  Table A; Target 102422; HLA-B*58:01; ZNF560; ENSG00000198028; CTA
VAVEFTQEEW

SEQ ID NO: 102423 - protein, 10 aa, Homo sapiens
  Table A; Target 102423; HLA-C*16:04; ZNF560; ENSG00000198028; CTA
VAVEFTQEEW

SEQ ID NO: 102424 - protein, 8 aa, Homo sapiens
  Table A; Target 102424; HLA-A*30:01; ZNF560; ENSG00000198028; CTA
VEFTQEEW

SEQ ID NO: 102425 - protein, 8 aa, Homo sapiens
  Table A; Target 102425; HLA-B*18:01; ZNF560; ENSG00000198028; CTA
VEFTQEEW

SEQ ID NO: 102426 - protein, 8 aa, Homo sapiens
  Table A; Target 102426; HLA-B*27:02; ZNF560; ENSG00000198028; CTA
VEFTQEEW

SEQ ID NO: 102427 - protein, 8 aa, Homo sapiens
  Table A; Target 102427; HLA-B*44:02; ZNF560; ENSG00000198028; CTA
VEFTQEEW

SEQ ID NO: 102428 - protein, 8 aa, Homo sapiens
  Table A; Target 102428; HLA-B*44:03; ZNF560; ENSG00000198028; CTA
VEFTQEEW

SEQ ID NO: 102429 - protein, 8 aa, Homo sapiens
  Table A; Target 102429; HLA-B*49:01; ZNF560; ENSG00000198028; CTA
VEFTQEEW

SEQ ID NO: 102430 - protein, 8 aa, Homo sapiens
  Table A; Target 102430; HLA-B*57:01; ZNF560; ENSG00000198028; CTA
VEFTQEEW

SEQ ID NO: 102431 - protein, 8 aa, Homo sapiens
  Table A; Target 102431; HLA-C*16:04; ZNF560; ENSG00000198028; CTA
VEFTQEEW

SEQ ID NO: 102432 - protein, 10 aa, Homo sapiens
  Table A; Target 102432; HLA-A*30:01; ZNF560; ENSG00000198028; CTA
VEFTQEEWTL

SEQ ID NO: 102433 - protein, 10 aa, Homo sapiens
  Table A; Target 102433; HLA-B*40:01; ZNF560; ENSG00000198028; CTA
VEFTQEEWTL

SEQ ID NO: 102434 - protein, 10 aa, Homo sapiens
  Table A; Target 102434; HLA-B*18:01; ZNF560; ENSG00000198028; CTA
VETHIIKNPY

SEQ ID NO: 102435 - protein, 10 aa, Homo sapiens
  Table A; Target 102435; HLA-B*44:02; ZNF560; ENSG00000198028; CTA
VETHIIKNPY

SEQ ID NO: 102436 - protein, 10 aa, Homo sapiens
  Table A; Target 102436; HLA-B*44:03; ZNF560; ENSG00000198028; CTA
VETHIIKNPY

SEQ ID NO: 102437 - protein, 9 aa, Homo sapiens
  Table A; Target 102437; HLA-A*24:02; ZNF560; ENSG00000198028; CTA
VFSKHGKSF

SEQ ID NO: 102438 - protein, 8 aa, Homo sapiens
  Table A; Target 102438; HLA-A*23:01; ZNF560; ENSG00000198028; CTA
VFVSFSSL

SEQ ID NO: 102439 - protein, 8 aa, Homo sapiens
  Table A; Target 102439; HLA-C*01:02; ZNF560; ENSG00000198028; CTA
VFVSFSSL

SEQ ID NO: 102440 - protein, 8 aa, Homo sapiens
  Table A; Target 102440; HLA-C*14:02; ZNF560; ENSG00000198028; CTA
VFVSFSSL

SEQ ID NO: 102441 - protein, 9 aa, Homo sapiens
  Table A; Target 102441; HLA-A*23:01; ZNF560; ENSG00000198028; CTA
VFVSFSSLF

SEQ ID NO: 102442 - protein, 9 aa, Homo sapiens
  Table A; Target 102442; HLA-A*24:02; ZNF560; ENSG00000198028; CTA
VFVSFSSLF

SEQ ID NO: 102443 - protein, 9 aa, Homo sapiens
  Table A; Target 102443; HLA-A*29:02; ZNF560; ENSG00000198028; CTA
VFVSFSSLF

SEQ ID NO: 102444 - protein, 9 aa, Homo sapiens
  Table A; Target 102444; HLA-B*15:03; ZNF560; ENSG00000198028; CTA
VFVSFSSLF

SEQ ID NO: 102445 - protein, 9 aa, Homo sapiens
  Table A; Target 102445; HLA-C*14:02; ZNF560; ENSG00000198028; CTA
VFVSFSSLF

SEQ ID NO: 102446 - protein, 9 aa, Homo sapiens
  Table A; Target 102446; HLA-A*02:04; ZNF560; ENSG00000198028; CTA
VLQDWAIKH

SEQ ID NO: 102447 - protein, 9 aa, Homo sapiens
  Table A; Target 102447; HLA-A*03:01; ZNF560; ENSG00000198028; CTA
VLQDWAIKH

SEQ ID NO: 102448 - protein, 9 aa, Homo sapiens
  Table A; Target 102448; HLA-A*03:02; ZNF560; ENSG00000198028; CTA
VLQDWAIKH

SEQ ID NO: 102449 - protein, 9 aa, Homo sapiens
  Table A; Target 102449; HLA-A*02:04; ZNF560; ENSG00000198028; CTA
VLQEWKMCL

SEQ ID NO: 102450 - protein, 9 aa, Homo sapiens
  Table A; Target 102450; HLA-A*02:03; ZNF560; ENSG00000198028; CTA
VMLENYENV

SEQ ID NO: 102451 - protein, 9 aa, Homo sapiens
  Table A; Target 102451; HLA-A*02:04; ZNF560; ENSG00000198028; CTA
VMLENYENV

SEQ ID NO: 102452 - protein, 9 aa, Homo sapiens
  Table A; Target 102452; HLA-A*02:07; ZNF560; ENSG00000198028; CTA
VMLENYENV

SEQ ID NO: 102453 - protein, 9 aa, Homo sapiens
  Table A; Target 102453; HLA-B*13:02; ZNF560; ENSG00000198028; CTA
VMLENYENV

SEQ ID NO: 102454 - protein, 9 aa, Homo sapiens
  Table A; Target 102454; HLA-B*55:01; ZNF560; ENSG00000198028; CTA
VMLENYENV

SEQ ID NO: 102455 - protein, 11 aa, Homo sapiens
  Table A; Target 102455; HLA-A*03:02; ZNF560; ENSG00000198028; CTA
VMLENYENVAK

SEQ ID NO: 102456 - protein, 11 aa, Homo sapiens
  Table A; Target 102456; HLA-A*11:01; ZNF560; ENSG00000198028; CTA
VMLENYENVAK

SEQ ID NO: 102457 - protein, 11 aa, Homo sapiens
  Table A; Target 102457; HLA-B*27:02; ZNF560; ENSG00000198028; CTA
VMLENYENVAK

SEQ ID NO: 102458 - protein, 9 aa, Homo sapiens
  Table A; Target 102458; HLA-A*02:01; ZNF560; ENSG00000198028; CTA
VMLENYKNL

SEQ ID NO: 102459 - protein, 9 aa, Homo sapiens
  Table A; Target 102459; HLA-A*02:03; ZNF560; ENSG00000198028; CTA
VMLENYKNL

SEQ ID NO: 102460 - protein, 9 aa, Homo sapiens
  Table A; Target 102460; HLA-A*02:04; ZNF560; ENSG00000198028; CTA
VMLENYKNL

SEQ ID NO: 102461 - protein, 9 aa, Homo sapiens
  Table A; Target 102461; HLA-A*02:07; ZNF560; ENSG00000198028; CTA
VMLENYKNL

SEQ ID NO: 102462 - protein, 9 aa, Homo sapiens
  Table A; Target 102462; HLA-A*24:02; ZNF560; ENSG00000198028; CTA
VMLENYKNL

SEQ ID NO: 102463 - protein, 9 aa, Homo sapiens
  Table A; Target 102463; HLA-A*68:02; ZNF560; ENSG00000198028; CTA
VPSGFLEHV

SEQ ID NO: 102464 - protein, 9 aa, Homo sapiens
  Table A; Target 102464; HLA-B*07:02; ZNF560; ENSG00000198028; CTA
VPSGFLEHV

SEQ ID NO: 102465 - protein, 9 aa, Homo sapiens
  Table A; Target 102465; HLA-B*51:01; ZNF560; ENSG00000198028; CTA
VPSGFLEHV

SEQ ID NO: 102466 - protein, 9 aa, Homo sapiens
  Table A; Target 102466; HLA-B*54:01; ZNF560; ENSG00000198028; CTA
VPSGFLEHV

SEQ ID NO: 102467 - protein, 9 aa, Homo sapiens
  Table A; Target 102467; HLA-B*55:01; ZNF560; ENSG00000198028; CTA
VPSGFLEHV

SEQ ID NO: 102468 - protein, 9 aa, Homo sapiens
  Table A; Target 102468; HLA-B*56:01; ZNF560; ENSG00000198028; CTA
VPSGFLEHV

SEQ ID NO: 102469 - protein, 9 aa, Homo sapiens
  Table A; Target 102469; HLA-C*16:02; ZNF560; ENSG00000198028; CTA
VPSGFLEHV

SEQ ID NO: 102470 - protein, 10 aa, Homo sapiens
  Table A; Target 102470; HLA-A*33:01; ZNF560; ENSG00000198028; CTA
VPSGFLEHVR

SEQ ID NO: 102471 - protein, 10 aa, Homo sapiens
  Table A; Target 102471; HLA-A*33:03; ZNF560; ENSG00000198028; CTA
VPSGFLEHVR

SEQ ID NO: 102472 - protein, 10 aa, Homo sapiens
  Table A; Target 102472; HLA-A*68:01; ZNF560; ENSG00000198028; CTA
VPSGFLEHVR

SEQ ID NO: 102473 - protein, 10 aa, Homo sapiens
  Table A; Target 102473; HLA-C*07:06; ZNF560; ENSG00000198028; CTA
VPSGFLEHVR

SEQ ID NO: 102474 - protein, 8 aa, Homo sapiens
  Table A; Target 102474; HLA-B*58:01; ZNF560; ENSG00000198028; CTA
VSALQQEF

SEQ ID NO: 102475 - protein, 8 aa, Homo sapiens
  Table A; Target 102475; HLA-C*16:01; ZNF560; ENSG00000198028; CTA
VSALQQEF

SEQ ID NO: 102476 - protein, 9 aa, Homo sapiens
  Table A; Target 102476; HLA-B*57:01; ZNF560; ENSG00000198028; CTA
VSALQQEFW

SEQ ID NO: 102477 - protein, 9 aa, Homo sapiens
  Table A; Target 102477; HLA-B*58:01; ZNF560; ENSG00000198028; CTA
VSALQQEFW

SEQ ID NO: 102478 - protein, 10 aa, Homo sapiens
  Table A; Target 102478; HLA-A*68:02; ZNF560; ENSG00000198028; CTA
VSFSSLFAHL

SEQ ID NO: 102479 - protein, 9 aa, Homo sapiens
  Table A; Target 102479; HLA-A*68:02; ZNF560; ENSG00000198028; CTA
VSSSLVDHL

SEQ ID NO: 102480 - protein, 9 aa, Homo sapiens
  Table A; Target 102480; HLA-B*27:05; ZNF560; ENSG00000198028; CTA
VSSSLVDHL

SEQ ID NO: 102481 - protein, 9 aa, Homo sapiens
  Table A; Target 102481; HLA-C*12:03; ZNF560; ENSG00000198028; CTA
VSSSLVDHL

SEQ ID NO: 102482 - protein, 9 aa, Homo sapiens
  Table A; Target 102482; HLA-C*16:02; ZNF560; ENSG00000198028; CTA
VSSSLVDHL

SEQ ID NO: 102483 - protein, 10 aa, Homo sapiens
  Table A; Target 102483; HLA-A*01:01; ZNF560; ENSG00000198028; CTA
VTFDSVAVEF

SEQ ID NO: 102484 - protein, 10 aa, Homo sapiens
  Table A; Target 102484; HLA-A*03:02; ZNF560; ENSG00000198028; CTA
VTFDSVAVEF

SEQ ID NO: 102485 - protein, 10 aa, Homo sapiens
  Table A; Target 102485; HLA-A*11:01; ZNF560; ENSG00000198028; CTA
VTFDSVAVEF

SEQ ID NO: 102486 - protein, 10 aa, Homo sapiens
  Table A; Target 102486; HLA-A*23:01; ZNF560; ENSG00000198028; CTA
VTFDSVAVEF

SEQ ID NO: 102487 - protein, 10 aa, Homo sapiens
  Table A; Target 102487; HLA-A*24:02; ZNF560; ENSG00000198028; CTA
VTFDSVAVEF

SEQ ID NO: 102488 - protein, 10 aa, Homo sapiens
  Table A; Target 102488; HLA-A*25:01; ZNF560; ENSG00000198028; CTA
VTFDSVAVEF

SEQ ID NO: 102489 - protein, 10 aa, Homo sapiens
  Table A; Target 102489; HLA-A*26:01; ZNF560; ENSG00000198028; CTA
VTFDSVAVEF

SEQ ID NO: 102490 - protein, 10 aa, Homo sapiens
  Table A; Target 102490; HLA-A*29:02; ZNF560; ENSG00000198028; CTA
VTFDSVAVEF

SEQ ID NO: 102491 - protein, 10 aa, Homo sapiens
  Table A; Target 102491; HLA-A*30:02; ZNF560; ENSG00000198028; CTA
VTFDSVAVEF

SEQ ID NO: 102492 - protein, 10 aa, Homo sapiens
  Table A; Target 102492; HLA-A*32:01; ZNF560; ENSG00000198028; CTA
VTFDSVAVEF

SEQ ID NO: 102493 - protein, 10 aa, Homo sapiens
  Table A; Target 102493; HLA-A*68:01; ZNF560; ENSG00000198028; CTA
VTFDSVAVEF

SEQ ID NO: 102494 - protein, 10 aa, Homo sapiens
  Table A; Target 102494; HLA-A*68:02; ZNF560; ENSG00000198028; CTA
VTFDSVAVEF

SEQ ID NO: 102495 - protein, 10 aa, Homo sapiens
  Table A; Target 102495; HLA-B*15:01; ZNF560; ENSG00000198028; CTA
VTFDSVAVEF

SEQ ID NO: 102496 - protein, 10 aa, Homo sapiens
  Table A; Target 102496; HLA-B*15:03; ZNF560; ENSG00000198028; CTA
VTFDSVAVEF

SEQ ID NO: 102497 - protein, 10 aa, Homo sapiens
  Table A; Target 102497; HLA-B*27:02; ZNF560; ENSG00000198028; CTA
VTFDSVAVEF

SEQ ID NO: 102498 - protein, 10 aa, Homo sapiens
  Table A; Target 102498; HLA-B*35:01; ZNF560; ENSG00000198028; CTA
VTFDSVAVEF

SEQ ID NO: 102499 - protein, 10 aa, Homo sapiens
  Table A; Target 102499; HLA-B*46:01; ZNF560; ENSG00000198028; CTA
VTFDSVAVEF

SEQ ID NO: 102500 - protein, 10 aa, Homo sapiens
  Table A; Target 102500; HLA-B*57:01; ZNF560; ENSG00000198028; CTA
VTFDSVAVEF

SEQ ID NO: 102501 - protein, 10 aa, Homo sapiens
  Table A; Target 102501; HLA-B*58:01; ZNF560; ENSG00000198028; CTA
VTFDSVAVEF

SEQ ID NO: 102502 - protein, 10 aa, Homo sapiens
  Table A; Target 102502; HLA-C*02:02; ZNF560; ENSG00000198028; CTA
VTFDSVAVEF

SEQ ID NO: 102503 - protein, 10 aa, Homo sapiens
  Table A; Target 102503; HLA-C*03:03; ZNF560; ENSG00000198028; CTA
VTFDSVAVEF

SEQ ID NO: 102504 - protein, 10 aa, Homo sapiens
  Table A; Target 102504; HLA-C*07:04; ZNF560; ENSG00000198028; CTA
VTFDSVAVEF

SEQ ID NO: 102505 - protein, 10 aa, Homo sapiens
  Table A; Target 102505; HLA-C*07:06; ZNF560; ENSG00000198028; CTA
VTFDSVAVEF

SEQ ID NO: 102506 - protein, 10 aa, Homo sapiens
  Table A; Target 102506; HLA-C*12:03; ZNF560; ENSG00000198028; CTA
VTFDSVAVEF

SEQ ID NO: 102507 - protein, 10 aa, Homo sapiens
  Table A; Target 102507; HLA-C*16:04; ZNF560; ENSG00000198028; CTA
VTFDSVAVEF

SEQ ID NO: 102508 - protein, 10 aa, Homo sapiens
  Table A; Target 102508; HLA-A*11:01; ZNF560; ENSG00000198028; CTA
VTFEDTAVDF

SEQ ID NO: 102509 - protein, 10 aa, Homo sapiens
  Table A; Target 102509; HLA-B*27:02; ZNF560; ENSG00000198028; CTA
VTFEDTAVDF

SEQ ID NO: 102510 - protein, 10 aa, Homo sapiens
  Table A; Target 102510; HLA-B*35:01; ZNF560; ENSG00000198028; CTA
VTFEDTAVDF

SEQ ID NO: 102511 - protein, 10 aa, Homo sapiens
  Table A; Target 102511; HLA-B*46:01; ZNF560; ENSG00000198028; CTA
VTFEDTAVDF

SEQ ID NO: 102512 - protein, 10 aa, Homo sapiens
  Table A; Target 102512; HLA-B*57:01; ZNF560; ENSG00000198028; CTA
VTFEDTAVDF

SEQ ID NO: 102513 - protein, 10 aa, Homo sapiens
  Table A; Target 102513; HLA-B*58:01; ZNF560; ENSG00000198028; CTA
VTFEDTAVDF

SEQ ID NO: 102514 - protein, 10 aa, Homo sapiens
  Table A; Target 102514; HLA-C*02:02; ZNF560; ENSG00000198028; CTA
VTFEDTAVDF

SEQ ID NO: 102515 - protein, 10 aa, Homo sapiens
  Table A; Target 102515; HLA-C*12:03; ZNF560; ENSG00000198028; CTA
VTFEDTAVDF

SEQ ID NO: 102516 - protein, 9 aa, Homo sapiens
  Table A; Target 102516; HLA-A*03:02; ZNF560; ENSG00000198028; CTA
VVSSSLVDH

SEQ ID NO: 102517 - protein, 9 aa, Homo sapiens
  Table A; Target 102517; HLA-A*11:01; ZNF560; ENSG00000198028; CTA
VVSSSLVDH

SEQ ID NO: 102518 - protein, 10 aa, Homo sapiens
  Table A; Target 102518; HLA-B*27:05; ZNF560; ENSG00000198028; CTA
VVSSSLVDHL

SEQ ID NO: 102519 - protein, 9 aa, Homo sapiens
  Table A; Target 102519; HLA-B*08:01; ZNF560; ENSG00000198028; CTA
WAIKHQTSV

SEQ ID NO: 102520 - protein, 9 aa, Homo sapiens
  Table A; Target 102520; HLA-B*13:02; ZNF560; ENSG00000198028; CTA
WAIKHQTSV

SEQ ID NO: 102521 - protein, 9 aa, Homo sapiens
  Table A; Target 102521; HLA-B*46:01; ZNF560; ENSG00000198028; CTA
WAIKHQTSV

SEQ ID NO: 102522 - protein, 9 aa, Homo sapiens
  Table A; Target 102522; HLA-B*51:01; ZNF560; ENSG00000198028; CTA
WAIKHQTSV

SEQ ID NO: 102523 - protein, 9 aa, Homo sapiens
  Table A; Target 102523; HLA-B*54:01; ZNF560; ENSG00000198028; CTA
WAIKHQTSV

SEQ ID NO: 102524 - protein, 9 aa, Homo sapiens
  Table A; Target 102524; HLA-C*02:02; ZNF560; ENSG00000198028; CTA
WAIKHQTSV

SEQ ID NO: 102525 - protein, 9 aa, Homo sapiens
  Table A; Target 102525; HLA-A*33:03; ZNF560; ENSG00000198028; CTA
WTLLDPAQR

SEQ ID NO: 102526 - protein, 8 aa, Homo sapiens
  Table A; Target 102526; HLA-B*08:01; ZNF560; ENSG00000198028; CTA
YAKDLLSL

SEQ ID NO: 102527 - protein, 8 aa, Homo sapiens
  Table A; Target 102527; HLA-B*46:01; ZNF560; ENSG00000198028; CTA
YAKDLLSL

SEQ ID NO: 102528 - protein, 8 aa, Homo sapiens
  Table A; Target 102528; HLA-C*03:04; ZNF560; ENSG00000198028; CTA
YAKDLLSL

SEQ ID NO: 102529 - protein, 9 aa, Homo sapiens
  Table A; Target 102529; HLA-A*01:01; ZNF560; ENSG00000198028; CTA
YAKDLLSLY

SEQ ID NO: 102530 - protein, 9 aa, Homo sapiens
  Table A; Target 102530; HLA-A*25:01; ZNF560; ENSG00000198028; CTA
YAKDLLSLY

SEQ ID NO: 102531 - protein, 9 aa, Homo sapiens
  Table A; Target 102531; HLA-A*26:01; ZNF560; ENSG00000198028; CTA
YAKDLLSLY

SEQ ID NO: 102532 - protein, 9 aa, Homo sapiens
  Table A; Target 102532; HLA-A*29:02; ZNF560; ENSG00000198028; CTA
YAKDLLSLY

SEQ ID NO: 102533 - protein, 9 aa, Homo sapiens
  Table A; Target 102533; HLA-A*30:02; ZNF560; ENSG00000198028; CTA
YAKDLLSLY

SEQ ID NO: 102534 - protein, 9 aa, Homo sapiens
  Table A; Target 102534; HLA-B*15:01; ZNF560; ENSG00000198028; CTA
YAKDLLSLY

SEQ ID NO: 102535 - protein, 9 aa, Homo sapiens
  Table A; Target 102535; HLA-B*15:03; ZNF560; ENSG00000198028; CTA
YAKDLLSLY

SEQ ID NO: 102536 - protein, 9 aa, Homo sapiens
  Table A; Target 102536; HLA-B*35:01; ZNF560; ENSG00000198028; CTA
YAKDLLSLY

SEQ ID NO: 102537 - protein, 9 aa, Homo sapiens
  Table A; Target 102537; HLA-B*46:01; ZNF560; ENSG00000198028; CTA
YAKDLLSLY

SEQ ID NO: 102538 - protein, 9 aa, Homo sapiens
  Table A; Target 102538; HLA-B*57:01; ZNF560; ENSG00000198028; CTA
YAKDLLSLY

SEQ ID NO: 102539 - protein, 9 aa, Homo sapiens
  Table A; Target 102539; HLA-C*02:02; ZNF560; ENSG00000198028; CTA
YAKDLLSLY

SEQ ID NO: 102540 - protein, 9 aa, Homo sapiens
  Table A; Target 102540; HLA-C*07:01; ZNF560; ENSG00000198028; CTA
YAKDLLSLY

SEQ ID NO: 102541 - protein, 9 aa, Homo sapiens
  Table A; Target 102541; HLA-C*12:03; ZNF560; ENSG00000198028; CTA
YAKDLLSLY

SEQ ID NO: 102542 - protein, 9 aa, Homo sapiens
  Table A; Target 102542; HLA-C*16:04; ZNF560; ENSG00000198028; CTA
YAKDLLSLY

SEQ ID NO: 102543 - protein, 11 aa, Homo sapiens
  Table A; Target 102543; HLA-A*33:01; ZNF560; ENSG00000198028; CTA
YAKDLLSLYNK

SEQ ID NO: 102544 - protein, 9 aa, Homo sapiens
  Table A; Target 102544; HLA-A*29:02; ZNF560; ENSG00000198028; CTA
YCLTNCYQY

SEQ ID NO: 102545 - protein, 9 aa, Homo sapiens
  Table A; Target 102545; HLA-C*07:01; ZNF560; ENSG00000198028; CTA
YCLTNCYQY

SEQ ID NO: 102546 - protein, 10 aa, Homo sapiens
  Table A; Target 102546; HLA-B*44:02; ZNF560; ENSG00000198028; CTA
YEHKEYGKAF

SEQ ID NO: 102547 - protein, 10 aa, Homo sapiens
  Table A; Target 102547; HLA-B*44:03; ZNF560; ENSG00000198028; CTA
YEHKEYGKAF

SEQ ID NO: 102548 - protein, 9 aa, Homo sapiens
  Table A; Target 102548; HLA-A*23:01; ZNF560; ENSG00000198028; CTA
YENVAKVGF

SEQ ID NO: 102549 - protein, 9 aa, Homo sapiens
  Table A; Target 102549; HLA-A*24:02; ZNF560; ENSG00000198028; CTA
YENVAKVGF

SEQ ID NO: 102550 - protein, 9 aa, Homo sapiens
  Table A; Target 102550; HLA-A*30:01; ZNF560; ENSG00000198028; CTA
YENVAKVGF

SEQ ID NO: 102551 - protein, 9 aa, Homo sapiens
  Table A; Target 102551; HLA-A*32:01; ZNF560; ENSG00000198028; CTA
YENVAKVGF

SEQ ID NO: 102552 - protein, 9 aa, Homo sapiens
  Table A; Target 102552; HLA-B*08:01; ZNF560; ENSG00000198028; CTA
YENVAKVGF

SEQ ID NO: 102553 - protein, 9 aa, Homo sapiens
  Table A; Target 102553; HLA-B*15:01; ZNF560; ENSG00000198028; CTA
YENVAKVGF

SEQ ID NO: 102554 - protein, 9 aa, Homo sapiens
  Table A; Target 102554; HLA-B*15:03; ZNF560; ENSG00000198028; CTA
YENVAKVGF

SEQ ID NO: 102555 - protein, 9 aa, Homo sapiens
  Table A; Target 102555; HLA-B*27:02; ZNF560; ENSG00000198028; CTA
YENVAKVGF

SEQ ID NO: 102556 - protein, 9 aa, Homo sapiens
  Table A; Target 102556; HLA-B*38:01; ZNF560; ENSG00000198028; CTA
YENVAKVGF

SEQ ID NO: 102557 - protein, 9 aa, Homo sapiens
  Table A; Target 102557; HLA-B*40:01; ZNF560; ENSG00000198028; CTA
YENVAKVGF

SEQ ID NO: 102558 - protein, 9 aa, Homo sapiens
  Table A; Target 102558; HLA-B*40:02; ZNF560; ENSG00000198028; CTA
YENVAKVGF

SEQ ID NO: 102559 - protein, 9 aa, Homo sapiens
  Table A; Target 102559; HLA-B*49:01; ZNF560; ENSG00000198028; CTA
YENVAKVGF

SEQ ID NO: 102560 - protein, 9 aa, Homo sapiens
  Table A; Target 102560; HLA-B*58:01; ZNF560; ENSG00000198028; CTA
YENVAKVGF

SEQ ID NO: 102561 - protein, 9 aa, Homo sapiens
  Table A; Target 102561; HLA-C*02:02; ZNF560; ENSG00000198028; CTA
YENVAKVGF

SEQ ID NO: 102562 - protein, 9 aa, Homo sapiens
  Table A; Target 102562; HLA-C*04:01; ZNF560; ENSG00000198028; CTA
YENVAKVGF

SEQ ID NO: 102563 - protein, 9 aa, Homo sapiens
  Table A; Target 102563; HLA-C*07:04; ZNF560; ENSG00000198028; CTA
YENVAKVGF

SEQ ID NO: 102564 - protein, 9 aa, Homo sapiens
  Table A; Target 102564; HLA-C*14:02; ZNF560; ENSG00000198028; CTA
YENVAKVGF

SEQ ID NO: 102565 - protein, 9 aa, Homo sapiens
  Table A; Target 102565; HLA-C*16:01; ZNF560; ENSG00000198028; CTA
YENVAKVGF

SEQ ID NO: 102566 - protein, 9 aa, Homo sapiens
  Table A; Target 102566; HLA-C*16:04; ZNF560; ENSG00000198028; CTA
YENVAKVGF

SEQ ID NO: 102567 - protein, 11 aa, Homo sapiens
  Table A; Target 102567; HLA-A*30:01; ZNF560; ENSG00000198028; CTA
YENVAKVGFQL

SEQ ID NO: 102568 - protein, 10 aa, Homo sapiens
  Table A; Target 102568; HLA-A*29:02; ZNF560; ENSG00000198028; CTA
YGKAFIYQSY

SEQ ID NO: 102569 - protein, 10 aa, Homo sapiens
  Table A; Target 102569; HLA-A*30:02; ZNF560; ENSG00000198028; CTA
YGKAFIYQSY

SEQ ID NO: 102570 - protein, 10 aa, Homo sapiens
  Table A; Target 102570; HLA-B*46:01; ZNF560; ENSG00000198028; CTA
YGKAFIYQSY

SEQ ID NO: 102571 - protein, 10 aa, Homo sapiens
  Table A; Target 102571; HLA-C*02:02; ZNF560; ENSG00000198028; CTA
YGKAFIYQSY

SEQ ID NO: 102572 - protein, 9 aa, Homo sapiens
  Table A; Target 102572; HLA-B*15:01; ZNF560; ENSG00000198028; CTA
YKNLSSVGY

SEQ ID NO: 102573 - protein, 9 aa, Homo sapiens
  Table A; Target 102573; HLA-B*39:01; ZNF560; ENSG00000198028; CTA
YKNLSSVGY

SEQ ID NO: 102574 - protein, 9 aa, Homo sapiens
  Table A; Target 102574; HLA-C*07:01; ZNF560; ENSG00000198028; CTA
YKNLSSVGY

SEQ ID NO: 102575 - protein, 9 aa, Homo sapiens
  Table A; Target 102575; HLA-C*07:04; ZNF560; ENSG00000198028; CTA
YKNLSSVGY

SEQ ID NO: 102576 - protein, 9 aa, Homo sapiens
  Table A; Target 102576; HLA-C*16:04; ZNF560; ENSG00000198028; CTA
YKNLSSVGY

SEQ ID NO: 102577 - protein, 8 aa, Homo sapiens
  Table A; Target 102577; HLA-B*07:02; ZNF560; ENSG00000198028; CTA
YPSLFGHL

SEQ ID NO: 102578 - protein, 8 aa, Homo sapiens
  Table A; Target 102578; HLA-B*08:01; ZNF560; ENSG00000198028; CTA
YPSLFGHL

SEQ ID NO: 102579 - protein, 8 aa, Homo sapiens
  Table A; Target 102579; HLA-B*51:01; ZNF560; ENSG00000198028; CTA
YPSLFGHL

SEQ ID NO: 102580 - protein, 8 aa, Homo sapiens
  Table A; Target 102580; HLA-B*54:01; ZNF560; ENSG00000198028; CTA
YPSLFGHL

SEQ ID NO: 102581 - protein, 8 aa, Homo sapiens
  Table A; Target 102581; HLA-B*56:01; ZNF560; ENSG00000198028; CTA
YPSLFGHL

SEQ ID NO: 102582 - protein, 9 aa, Homo sapiens
  Table A; Target 102582; HLA-A*33:01; ZNF560; ENSG00000198028; CTA
YPSLFGHLR

SEQ ID NO: 102583 - protein, 10 aa, Homo sapiens
  Table A; Target 102583; HLA-B*51:01; ZNF560; ENSG00000198028; CTA
YPSLFGHLRV

SEQ ID NO: 102584 - protein, 10 aa, Homo sapiens
  Table A; Target 102584; HLA-B*54:01; ZNF560; ENSG00000198028; CTA
YPSLFGHLRV

SEQ ID NO: 102585 - protein, 9 aa, Homo sapiens
  Table A; Target 102585; HLA-B*35:01; ZNF560; ENSG00000198028; CTA
YPTHLNNHM

SEQ ID NO: 102586 - protein, 9 aa, Homo sapiens
  Table A; Target 102586; HLA-B*35:03; ZNF560; ENSG00000198028; CTA
YPTHLNNHM

SEQ ID NO: 102587 - protein, 9 aa, Homo sapiens
  Table A; Target 102587; HLA-B*54:01; ZNF560; ENSG00000198028; CTA
YPTHLNNHM

SEQ ID NO: 102588 - protein, 8 aa, Homo sapiens
  Table A; Target 102588; HLA-B*08:01; ZNF560; ENSG00000198028; CTA
YQLFKPSL

SEQ ID NO: 102589 - protein, 9 aa, Homo sapiens
  Table A; Target 102589; HLA-A*02:01; ZNF560; ENSG00000198028; CTA
YQLFKPSLI

SEQ ID NO: 102590 - protein, 9 aa, Homo sapiens
  Table A; Target 102590; HLA-A*02:03; ZNF560; ENSG00000198028; CTA
YQLFKPSLI

SEQ ID NO: 102591 - protein, 9 aa, Homo sapiens
  Table A; Target 102591; HLA-A*02:04; ZNF560; ENSG00000198028; CTA
YQLFKPSLI

SEQ ID NO: 102592 - protein, 9 aa, Homo sapiens
  Table A; Target 102592; HLA-A*30:01; ZNF560; ENSG00000198028; CTA
YQLFKPSLI

SEQ ID NO: 102593 - protein, 9 aa, Homo sapiens
  Table A; Target 102593; HLA-A*29:02; ZNF560; ENSG00000198028; CTA
YSDVMLENY

SEQ ID NO: 102594 - protein, 9 aa, Homo sapiens
  Table A; Target 102594; HLA-A*30:02; ZNF560; ENSG00000198028; CTA
YSDVMLENY

SEQ ID NO: 102595 - protein, 9 aa, Homo sapiens
  Table A; Target 102595; HLA-B*18:01; ZNF560; ENSG00000198028; CTA
YSDVMLENY

SEQ ID NO: 102596 - protein, 9 aa, Homo sapiens
  Table A; Target 102596; HLA-B*35:01; ZNF560; ENSG00000198028; CTA
YSDVMLENY

SEQ ID NO: 102597 - protein, 9 aa, Homo sapiens
  Table A; Target 102597; HLA-B*46:01; ZNF560; ENSG00000198028; CTA
YSDVMLENY

SEQ ID NO: 102598 - protein, 9 aa, Homo sapiens
  Table A; Target 102598; HLA-B*55:01; ZNF560; ENSG00000198028; CTA
YSDVMLENY

SEQ ID NO: 102599 - protein, 9 aa, Homo sapiens
  Table A; Target 102599; HLA-B*58:01; ZNF560; ENSG00000198028; CTA
YSDVMLENY

SEQ ID NO: 102600 - protein, 9 aa, Homo sapiens
  Table A; Target 102600; HLA-C*04:01; ZNF560; ENSG00000198028; CTA
YSDVMLENY

SEQ ID NO: 102601 - protein, 9 aa, Homo sapiens
  Table A; Target 102601; HLA-C*05:01; ZNF560; ENSG00000198028; CTA
YSDVMLENY

SEQ ID NO: 102602 - protein, 9 aa, Homo sapiens
  Table A; Target 102602; HLA-C*16:02; ZNF560; ENSG00000198028; CTA
YSDVMLENY

SEQ ID NO: 102603 - protein, 9 aa, Homo sapiens
  Table A; Target 102603; HLA-C*16:04; ZNF560; ENSG00000198028; CTA
YSDVMLENY

SEQ ID NO: 102604 - protein, 10 aa, Homo sapiens
  Table A; Target 102604; HLA-A*01:01; ZNF560; ENSG00000198028; CTA
YSDVMLENYK

SEQ ID NO: 102605 - protein, 10 aa, Homo sapiens
  Table A; Target 102605; HLA-B*27:02; ZNF560; ENSG00000198028; CTA
YSDVMLENYK

SEQ ID NO: 102606 - protein, 9 aa, Homo sapiens
  Table A; Target 102606; HLA-A*01:01; ZNF560,ZNF716; ENSG00000198028,ENSG00000182111; CTA,TAA
YRDVMLENY

SEQ ID NO: 102607 - protein, 8 aa, Homo sapiens
  Table A; Target 102607; HLA-C*14:02; ZNF716; ENSG00000182111; TAA
AFNCSSTL

SEQ ID NO: 102608 - protein, 8 aa, Homo sapiens
  Table A; Target 102608; HLA-C*14:02; ZNF716; ENSG00000182111; TAA
AFSLPSTF

SEQ ID NO: 102609 - protein, 10 aa, Homo sapiens
  Table A; Target 102609; HLA-A*29:02; ZNF716; ENSG00000182111; TAA
AFSLPSTFTY

SEQ ID NO: 102610 - protein, 10 aa, Homo sapiens
  Table A; Target 102610; HLA-A*30:02; ZNF716; ENSG00000182111; TAA
AFSLPSTFTY

SEQ ID NO: 102611 - protein, 8 aa, Homo sapiens
  Table A; Target 102611; HLA-C*14:02; ZNF716; ENSG00000182111; TAA
AFSLSSTL

SEQ ID NO: 102612 - protein, 11 aa, Homo sapiens
  Table A; Target 102612; HLA-A*03:02; ZNF716; ENSG00000182111; TAA
ATQNKTFQTHK

SEQ ID NO: 102613 - protein, 11 aa, Homo sapiens
  Table A; Target 102613; HLA-A*11:01; ZNF716; ENSG00000182111; TAA
ATQNKTFQTHK

SEQ ID NO: 102614 - protein, 10 aa, Homo sapiens
  Table A; Target 102614; HLA-A*11:01; ZNF716; ENSG00000182111; TAA
CGQEDLQVKK

SEQ ID NO: 102615 - protein, 9 aa, Homo sapiens
  Table A; Target 102615; HLA-A*02:07; ZNF716; ENSG00000182111; TAA
CLDHAQQNL

SEQ ID NO: 102616 - protein, 10 aa, Homo sapiens
  Table A; Target 102616; HLA-A*01:01; ZNF716; ENSG00000182111; TAA
CLDHAQQNLY

SEQ ID NO: 102617 - protein, 10 aa, Homo sapiens
  Table A; Target 102617; HLA-A*29:02; ZNF716; ENSG00000182111; TAA
CLDHAQQNLY

SEQ ID NO: 102618 - protein, 10 aa, Homo sapiens
  Table A; Target 102618; HLA-A*30:02; ZNF716; ENSG00000182111; TAA
CLDHAQQNLY

SEQ ID NO: 102619 - protein, 9 aa, Homo sapiens
  Table A; Target 102619; HLA-A*33:01; ZNF716; ENSG00000182111; TAA
DHAQQNLYR

SEQ ID NO: 102620 - protein, 11 aa, Homo sapiens
  Table A; Target 102620; HLA-A*25:01; ZNF716; ENSG00000182111; TAA
DIAIEFSLAEW

SEQ ID NO: 102621 - protein, 8 aa, Homo sapiens
  Table A; Target 102621; HLA-B*08:01; ZNF716; ENSG00000182111; TAA
DSLQKVIL

SEQ ID NO: 102622 - protein, 9 aa, Homo sapiens
  Table A; Target 102622; HLA-A*33:01; ZNF716; ENSG00000182111; TAA
DSLQKVILR

SEQ ID NO: 102623 - protein, 9 aa, Homo sapiens
  Table A; Target 102623; HLA-A*33:03; ZNF716; ENSG00000182111; TAA
DSLQKVILR

SEQ ID NO: 102624 - protein, 9 aa, Homo sapiens
  Table A; Target 102624; HLA-A*68:01; ZNF716; ENSG00000182111; TAA
DSLQKVILR

SEQ ID NO: 102625 - protein, 9 aa, Homo sapiens
  Table A; Target 102625; HLA-C*07:06; ZNF716; ENSG00000182111; TAA
DSLQKVILR

SEQ ID NO: 102626 - protein, 10 aa, Homo sapiens
  Table A; Target 102626; HLA-A*33:01; ZNF716; ENSG00000182111; TAA
DSLQKVILRR

SEQ ID NO: 102627 - protein, 10 aa, Homo sapiens
  Table A; Target 102627; HLA-A*25:01; ZNF716; ENSG00000182111; TAA
DVMLENYRNL

SEQ ID NO: 102628 - protein, 9 aa, Homo sapiens
  Table A; Target 102628; HLA-B*44:02; ZNF716; ENSG00000182111; TAA
EECDQTFKW

SEQ ID NO: 102629 - protein, 9 aa, Homo sapiens
  Table A; Target 102629; HLA-B*44:03; ZNF716; ENSG00000182111; TAA
EECDQTFKW

SEQ ID NO: 102630 - protein, 9 aa, Homo sapiens
  Table A; Target 102630; HLA-B*44:02; ZNF716; ENSG00000182111; TAA
EECGKAFSW

SEQ ID NO: 102631 - protein, 9 aa, Homo sapiens
  Table A; Target 102631; HLA-B*44:03; ZNF716; ENSG00000182111; TAA
EECGKAFSW

SEQ ID NO: 102632 - protein, 9 aa, Homo sapiens
  Table A; Target 102632; HLA-B*18:01; ZNF716; ENSG00000182111; TAA
EECGKAFTF

SEQ ID NO: 102633 - protein, 9 aa, Homo sapiens
  Table A; Target 102633; HLA-B*37:01; ZNF716; ENSG00000182111; TAA
EECGKAFTF

SEQ ID NO: 102634 - protein, 9 aa, Homo sapiens
  Table A; Target 102634; HLA-B*44:02; ZNF716; ENSG00000182111; TAA
EECGKAFTF

SEQ ID NO: 102635 - protein, 9 aa, Homo sapiens
  Table A; Target 102635; HLA-B*44:03; ZNF716; ENSG00000182111; TAA
EECGKAFTF

SEQ ID NO: 102636 - protein, 9 aa, Homo sapiens
  Table A; Target 102636; HLA-A*33:01; ZNF716; ENSG00000182111; TAA
EERGKVFSR

SEQ ID NO: 102637 - protein, 9 aa, Homo sapiens
  Table A; Target 102637; HLA-A*33:03; ZNF716; ENSG00000182111; TAA
EERGKVFSR

SEQ ID NO: 102638 - protein, 8 aa, Homo sapiens
  Table A; Target 102638; HLA-B*08:01; ZNF716; ENSG00000182111; TAA
EMVAKHPV

SEQ ID NO: 102639 - protein, 9 aa, Homo sapiens
  Table A; Target 102639; HLA-A*25:01; ZNF716; ENSG00000182111; TAA
ENYRNLVSL

SEQ ID NO: 102640 - protein, 9 aa, Homo sapiens
  Table A; Target 102640; HLA-A*33:01; ZNF716; ENSG00000182111; TAA
ENYRNLVSL

SEQ ID NO: 102641 - protein, 9 aa, Homo sapiens
  Table A; Target 102641; HLA-A*33:03; ZNF716; ENSG00000182111; TAA
ENYRNLVSL

SEQ ID NO: 102642 - protein, 8 aa, Homo sapiens
  Table A; Target 102642; HLA-B*08:01; ZNF716; ENSG00000182111; TAA
EQGIKDSL

SEQ ID NO: 102643 - protein, 9 aa, Homo sapiens
  Table A; Target 102643; HLA-B*38:01; ZNF716; ENSG00000182111; TAA
EQNKEPQNI

SEQ ID NO: 102644 - protein, 9 aa, Homo sapiens
  Table A; Target 102644; HLA-A*25:01; ZNF716; ENSG00000182111; TAA
EVHKGGYNY

SEQ ID NO: 102645 - protein, 9 aa, Homo sapiens
  Table A; Target 102645; HLA-A*26:01; ZNF716; ENSG00000182111; TAA
EVHKGGYNY

SEQ ID NO: 102646 - protein, 9 aa, Homo sapiens
  Table A; Target 102646; HLA-A*30:02; ZNF716; ENSG00000182111; TAA
EVHKGGYNY

SEQ ID NO: 102647 - protein, 9 aa, Homo sapiens
  Table A; Target 102647; HLA-B*35:01; ZNF716; ENSG00000182111; TAA
EVHKGGYNY

SEQ ID NO: 102648 - protein, 9 aa, Homo sapiens
  Table A; Target 102648; HLA-A*01:01; ZNF716; ENSG00000182111; TAA
FSLPSTFTY

SEQ ID NO: 102649 - protein, 9 aa, Homo sapiens
  Table A; Target 102649; HLA-A*23:01; ZNF716; ENSG00000182111; TAA
FSLPSTFTY

SEQ ID NO: 102650 - protein, 9 aa, Homo sapiens
  Table A; Target 102650; HLA-A*29:02; ZNF716; ENSG00000182111; TAA
FSLPSTFTY

SEQ ID NO: 102651 - protein, 9 aa, Homo sapiens
  Table A; Target 102651; HLA-A*30:02; ZNF716; ENSG00000182111; TAA
FSLPSTFTY

SEQ ID NO: 102652 - protein, 9 aa, Homo sapiens
  Table A; Target 102652; HLA-A*32:01; ZNF716; ENSG00000182111; TAA
FSLPSTFTY

SEQ ID NO: 102653 - protein, 9 aa, Homo sapiens
  Table A; Target 102653; HLA-B*15:03; ZNF716; ENSG00000182111; TAA
FSLPSTFTY

SEQ ID NO: 102654 - protein, 9 aa, Homo sapiens
  Table A; Target 102654; HLA-B*35:01; ZNF716; ENSG00000182111; TAA
FSLPSTFTY

SEQ ID NO: 102655 - protein, 9 aa, Homo sapiens
  Table A; Target 102655; HLA-B*46:01; ZNF716; ENSG00000182111; TAA
FSLPSTFTY

SEQ ID NO: 102656 - protein, 9 aa, Homo sapiens
  Table A; Target 102656; HLA-B*57:01; ZNF716; ENSG00000182111; TAA
FSLPSTFTY

SEQ ID NO: 102657 - protein, 9 aa, Homo sapiens
  Table A; Target 102657; HLA-B*58:01; ZNF716; ENSG00000182111; TAA
FSLPSTFTY

SEQ ID NO: 102658 - protein, 9 aa, Homo sapiens
  Table A; Target 102658; HLA-C*02:02; ZNF716; ENSG00000182111; TAA
FSLPSTFTY

SEQ ID NO: 102659 - protein, 9 aa, Homo sapiens
  Table A; Target 102659; HLA-C*03:04; ZNF716; ENSG00000182111; TAA
FSLPSTFTY

SEQ ID NO: 102660 - protein, 9 aa, Homo sapiens
  Table A; Target 102660; HLA-C*16:01; ZNF716; ENSG00000182111; TAA
FSLPSTFTY

SEQ ID NO: 102661 - protein, 9 aa, Homo sapiens
  Table A; Target 102661; HLA-C*16:04; ZNF716; ENSG00000182111; TAA
FSLPSTFTY

SEQ ID NO: 102662 - protein, 9 aa, Homo sapiens
  Table A; Target 102662; HLA-A*03:01; ZNF716; ENSG00000182111; TAA
FSLSSTLKK

SEQ ID NO: 102663 - protein, 9 aa, Homo sapiens
  Table A; Target 102663; HLA-A*11:01; ZNF716; ENSG00000182111; TAA
FSLSSTLKK

SEQ ID NO: 102664 - protein, 9 aa, Homo sapiens
  Table A; Target 102664; HLA-A*01:01; ZNF716; ENSG00000182111; TAA
FSRSTLTNY

SEQ ID NO: 102665 - protein, 9 aa, Homo sapiens
  Table A; Target 102665; HLA-A*30:02; ZNF716; ENSG00000182111; TAA
FSRSTLTNY

SEQ ID NO: 102666 - protein, 9 aa, Homo sapiens
  Table A; Target 102666; HLA-B*15:03; ZNF716; ENSG00000182111; TAA
FSRSTLTNY

SEQ ID NO: 102667 - protein, 9 aa, Homo sapiens
  Table A; Target 102667; HLA-B*46:01; ZNF716; ENSG00000182111; TAA
FSRSTLTNY

SEQ ID NO: 102668 - protein, 9 aa, Homo sapiens
  Table A; Target 102668; HLA-C*02:02; ZNF716; ENSG00000182111; TAA
FSRSTLTNY

SEQ ID NO: 102669 - protein, 10 aa, Homo sapiens
  Table A; Target 102669; HLA-B*44:02; ZNF716; ENSG00000182111; TAA
GECEVHKGGY

SEQ ID NO: 102670 - protein, 10 aa, Homo sapiens
  Table A; Target 102670; HLA-B*44:03; ZNF716; ENSG00000182111; TAA
GECEVHKGGY

SEQ ID NO: 102671 - protein, 9 aa, Homo sapiens
  Table A; Target 102671; HLA-A*02:03; ZNF716; ENSG00000182111; TAA
GIKDSLQKV

SEQ ID NO: 102672 - protein, 10 aa, Homo sapiens
  Table A; Target 102672; HLA-B*15:03; ZNF716; ENSG00000182111; TAA
GKAFSLPSTF

SEQ ID NO: 102673 - protein, 10 aa, Homo sapiens
  Table A; Target 102673; HLA-B*15:03; ZNF716; ENSG00000182111; TAA
GKAFSLSSTL

SEQ ID NO: 102674 - protein, 9 aa, Homo sapiens
  Table A; Target 102674; HLA-B*15:03; ZNF716; ENSG00000182111; TAA
GKVFSRSTL

SEQ ID NO: 102675 - protein, 10 aa, Homo sapiens
  Table A; Target 102675; HLA-B*07:02; ZNF716; ENSG00000182111; TAA
GPPGSREMGL

SEQ ID NO: 102676 - protein, 9 aa, Homo sapiens
  Table A; Target 102676; HLA-A*11:01; ZNF716; ENSG00000182111; TAA
GQEDLQVKK

SEQ ID NO: 102677 - protein, 9 aa, Homo sapiens
  Table A; Target 102677; HLA-B*27:05; ZNF716; ENSG00000182111; TAA
GQEDLQVKK

SEQ ID NO: 102678 - protein, 9 aa, Homo sapiens
  Table A; Target 102678; HLA-A*23:01; ZNF716; ENSG00000182111; TAA
GYNYVNQCL

SEQ ID NO: 102679 - protein, 9 aa, Homo sapiens
  Table A; Target 102679; HLA-A*24:02; ZNF716; ENSG00000182111; TAA
GYNYVNQCL

SEQ ID NO: 102680 - protein, 9 aa, Homo sapiens
  Table A; Target 102680; HLA-C*14:02; ZNF716; ENSG00000182111; TAA
GYNYVNQCL

SEQ ID NO: 102681 - protein, 9 aa, Homo sapiens
  Table A; Target 102681; HLA-A*01:01; ZNF716; ENSG00000182111; TAA
HTGEKPYKY

SEQ ID NO: 102682 - protein, 9 aa, Homo sapiens
  Table A; Target 102682; HLA-A*26:01; ZNF716; ENSG00000182111; TAA
HTGEKPYKY

SEQ ID NO: 102683 - protein, 9 aa, Homo sapiens
  Table A; Target 102683; HLA-A*29:02; ZNF716; ENSG00000182111; TAA
HTGEKPYKY

SEQ ID NO: 102684 - protein, 10 aa, Homo sapiens
  Table A; Target 102684; HLA-A*25:01; ZNF716; ENSG00000182111; TAA
IAIEFSLAEW

SEQ ID NO: 102685 - protein, 10 aa, Homo sapiens
  Table A; Target 102685; HLA-B*57:01; ZNF716; ENSG00000182111; TAA
IAIEFSLAEW

SEQ ID NO: 102686 - protein, 8 aa, Homo sapiens
  Table A; Target 102686; HLA-C*16:01; ZNF716; ENSG00000182111; TAA
IAVSKPDL

SEQ ID NO: 102687 - protein, 8 aa, Homo sapiens
  Table A; Target 102687; HLA-B*18:01; ZNF716; ENSG00000182111; TAA
IEFSLAEW

SEQ ID NO: 102688 - protein, 8 aa, Homo sapiens
  Table A; Target 102688; HLA-B*44:02; ZNF716; ENSG00000182111; TAA
IEFSLAEW

SEQ ID NO: 102689 - protein, 8 aa, Homo sapiens
  Table A; Target 102689; HLA-C*01:02; ZNF716; ENSG00000182111; TAA
IIHTGEKL

SEQ ID NO: 102690 - protein, 8 aa, Homo sapiens
  Table A; Target 102690; HLA-C*03:04; ZNF716; ENSG00000182111; TAA
IIHTGEKL

SEQ ID NO: 102691 - protein, 10 aa, Homo sapiens
  Table A; Target 102691; HLA-A*03:01; ZNF716; ENSG00000182111; TAA
IIHTGEKLYK

SEQ ID NO: 102692 - protein, 8 aa, Homo sapiens
  Table A; Target 102692; HLA-C*01:02; ZNF716; ENSG00000182111; TAA
IVHTGEKL

SEQ ID NO: 102693 - protein, 8 aa, Homo sapiens
  Table A; Target 102693; HLA-C*03:03; ZNF716; ENSG00000182111; TAA
IVHTGEKL

SEQ ID NO: 102694 - protein, 8 aa, Homo sapiens
  Table A; Target 102694; HLA-C*03:04; ZNF716; ENSG00000182111; TAA
IVHTGEKL

SEQ ID NO: 102695 - protein, 9 aa, Homo sapiens
  Table A; Target 102695; HLA-A*29:02; ZNF716; ENSG00000182111; TAA
IVHTGEKLY

SEQ ID NO: 102696 - protein, 9 aa, Homo sapiens
  Table A; Target 102696; HLA-A*30:02; ZNF716; ENSG00000182111; TAA
IVHTGEKLY

SEQ ID NO: 102697 - protein, 9 aa, Homo sapiens
  Table A; Target 102697; HLA-B*57:01; ZNF716; ENSG00000182111; TAA
IVHTGEKLY

SEQ ID NO: 102698 - protein, 9 aa, Homo sapiens
  Table A; Target 102698; HLA-B*58:01; ZNF716; ENSG00000182111; TAA
IVHTGEKLY

SEQ ID NO: 102699 - protein, 9 aa, Homo sapiens
  Table A; Target 102699; HLA-B*58:01; ZNF716; ENSG00000182111; TAA
KAFNCSSTL

SEQ ID NO: 102700 - protein, 9 aa, Homo sapiens
  Table A; Target 102700; HLA-C*03:03; ZNF716; ENSG00000182111; TAA
KAFNCSSTL

SEQ ID NO: 102701 - protein, 9 aa, Homo sapiens
  Table A; Target 102701; HLA-C*03:04; ZNF716; ENSG00000182111; TAA
KAFNCSSTL

SEQ ID NO: 102702 - protein, 9 aa, Homo sapiens
  Table A; Target 102702; HLA-C*12:03; ZNF716; ENSG00000182111; TAA
KAFNCSSTL

SEQ ID NO: 102703 - protein, 9 aa, Homo sapiens
  Table A; Target 102703; HLA-C*16:01; ZNF716; ENSG00000182111; TAA
KAFNCSSTL

SEQ ID NO: 102704 - protein, 9 aa, Homo sapiens
  Table A; Target 102704; HLA-C*16:02; ZNF716; ENSG00000182111; TAA
KAFNCSSTL

SEQ ID NO: 102705 - protein, 9 aa, Homo sapiens
  Table A; Target 102705; HLA-A*23:01; ZNF716; ENSG00000182111; TAA
KAFSLPSTF

SEQ ID NO: 102706 - protein, 9 aa, Homo sapiens
  Table A; Target 102706; HLA-A*30:02; ZNF716; ENSG00000182111; TAA
KAFSLPSTF

SEQ ID NO: 102707 - protein, 9 aa, Homo sapiens
  Table A; Target 102707; HLA-A*32:01; ZNF716; ENSG00000182111; TAA
KAFSLPSTF

SEQ ID NO: 102708 - protein, 9 aa, Homo sapiens
  Table A; Target 102708; HLA-B*15:01; ZNF716; ENSG00000182111; TAA
KAFSLPSTF

SEQ ID NO: 102709 - protein, 9 aa, Homo sapiens
  Table A; Target 102709; HLA-B*15:03; ZNF716; ENSG00000182111; TAA
KAFSLPSTF

SEQ ID NO: 102710 - protein, 9 aa, Homo sapiens
  Table A; Target 102710; HLA-B*46:01; ZNF716; ENSG00000182111; TAA
KAFSLPSTF

SEQ ID NO: 102711 - protein, 9 aa, Homo sapiens
  Table A; Target 102711; HLA-B*57:01; ZNF716; ENSG00000182111; TAA
KAFSLPSTF

SEQ ID NO: 102712 - protein, 9 aa, Homo sapiens
  Table A; Target 102712; HLA-B*58:01; ZNF716; ENSG00000182111; TAA
KAFSLPSTF

SEQ ID NO: 102713 - protein, 9 aa, Homo sapiens
  Table A; Target 102713; HLA-C*02:02; ZNF716; ENSG00000182111; TAA
KAFSLPSTF

SEQ ID NO: 102714 - protein, 9 aa, Homo sapiens
  Table A; Target 102714; HLA-C*12:03; ZNF716; ENSG00000182111; TAA
KAFSLPSTF

SEQ ID NO: 102715 - protein, 9 aa, Homo sapiens
  Table A; Target 102715; HLA-C*16:02; ZNF716; ENSG00000182111; TAA
KAFSLPSTF

SEQ ID NO: 102716 - protein, 9 aa, Homo sapiens
  Table A; Target 102716; HLA-C*16:04; ZNF716; ENSG00000182111; TAA
KAFSLPSTF

SEQ ID NO: 102717 - protein, 11 aa, Homo sapiens
  Table A; Target 102717; HLA-A*29:02; ZNF716; ENSG00000182111; TAA
KAFSLPSTFTY

SEQ ID NO: 102718 - protein, 11 aa, Homo sapiens
  Table A; Target 102718; HLA-A*30:02; ZNF716; ENSG00000182111; TAA
KAFSLPSTFTY

SEQ ID NO: 102719 - protein, 11 aa, Homo sapiens
  Table A; Target 102719; HLA-B*57:01; ZNF716; ENSG00000182111; TAA
KAFSLPSTFTY

SEQ ID NO: 102720 - protein, 11 aa, Homo sapiens
  Table A; Target 102720; HLA-C*02:02; ZNF716; ENSG00000182111; TAA
KAFSLPSTFTY

SEQ ID NO: 102721 - protein, 11 aa, Homo sapiens
  Table A; Target 102721; HLA-C*16:04; ZNF716; ENSG00000182111; TAA
KAFSLPSTFTY

SEQ ID NO: 102722 - protein, 9 aa, Homo sapiens
  Table A; Target 102722; HLA-A*30:01; ZNF716; ENSG00000182111; TAA
KAFSLSSTL

SEQ ID NO: 102723 - protein, 9 aa, Homo sapiens
  Table A; Target 102723; HLA-A*32:01; ZNF716; ENSG00000182111; TAA
KAFSLSSTL

SEQ ID NO: 102724 - protein, 9 aa, Homo sapiens
  Table A; Target 102724; HLA-B*07:02; ZNF716; ENSG00000182111; TAA
KAFSLSSTL

SEQ ID NO: 102725 - protein, 9 aa, Homo sapiens
  Table A; Target 102725; HLA-B*15:01; ZNF716; ENSG00000182111; TAA
KAFSLSSTL

SEQ ID NO: 102726 - protein, 9 aa, Homo sapiens
  Table A; Target 102726; HLA-B*15:03; ZNF716; ENSG00000182111; TAA
KAFSLSSTL

SEQ ID NO: 102727 - protein, 9 aa, Homo sapiens
  Table A; Target 102727; HLA-B*40:01; ZNF716; ENSG00000182111; TAA
KAFSLSSTL

SEQ ID NO: 102728 - protein, 9 aa, Homo sapiens
  Table A; Target 102728; HLA-B*46:01; ZNF716; ENSG00000182111; TAA
KAFSLSSTL

SEQ ID NO: 102729 - protein, 9 aa, Homo sapiens
  Table A; Target 102729; HLA-B*58:01; ZNF716; ENSG00000182111; TAA
KAFSLSSTL

SEQ ID NO: 102730 - protein, 9 aa, Homo sapiens
  Table A; Target 102730; HLA-C*01:02; ZNF716; ENSG00000182111; TAA
KAFSLSSTL

SEQ ID NO: 102731 - protein, 9 aa, Homo sapiens
  Table A; Target 102731; HLA-C*02:02; ZNF716; ENSG00000182111; TAA
KAFSLSSTL

SEQ ID NO: 102732 - protein, 9 aa, Homo sapiens
  Table A; Target 102732; HLA-C*03:03; ZNF716; ENSG00000182111; TAA
KAFSLSSTL

SEQ ID NO: 102733 - protein, 9 aa, Homo sapiens
  Table A; Target 102733; HLA-C*03:04; ZNF716; ENSG00000182111; TAA
KAFSLSSTL

SEQ ID NO: 102734 - protein, 9 aa, Homo sapiens
  Table A; Target 102734; HLA-C*05:01; ZNF716; ENSG00000182111; TAA
KAFSLSSTL

SEQ ID NO: 102735 - protein, 9 aa, Homo sapiens
  Table A; Target 102735; HLA-C*07:02; ZNF716; ENSG00000182111; TAA
KAFSLSSTL

SEQ ID NO: 102736 - protein, 9 aa, Homo sapiens
  Table A; Target 102736; HLA-C*12:03; ZNF716; ENSG00000182111; TAA
KAFSLSSTL

SEQ ID NO: 102737 - protein, 9 aa, Homo sapiens
  Table A; Target 102737; HLA-C*16:02; ZNF716; ENSG00000182111; TAA
KAFSLSSTL

SEQ ID NO: 102738 - protein, 9 aa, Homo sapiens
  Table A; Target 102738; HLA-C*16:04; ZNF716; ENSG00000182111; TAA
KAFSLSSTL

SEQ ID NO: 102739 - protein, 10 aa, Homo sapiens
  Table A; Target 102739; HLA-A*03:01; ZNF716; ENSG00000182111; TAA
KAFSLSSTLK

SEQ ID NO: 102740 - protein, 10 aa, Homo sapiens
  Table A; Target 102740; HLA-A*03:02; ZNF716; ENSG00000182111; TAA
KAFSLSSTLK

SEQ ID NO: 102741 - protein, 10 aa, Homo sapiens
  Table A; Target 102741; HLA-A*11:01; ZNF716; ENSG00000182111; TAA
KAFSLSSTLK

SEQ ID NO: 102742 - protein, 11 aa, Homo sapiens
  Table A; Target 102742; HLA-A*03:01; ZNF716; ENSG00000182111; TAA
KAFSLSSTLKK

SEQ ID NO: 102743 - protein, 9 aa, Homo sapiens
  Table A; Target 102743; HLA-A*32:01; ZNF716; ENSG00000182111; TAA
KAFSRSSTL

SEQ ID NO: 102744 - protein, 9 aa, Homo sapiens
  Table A; Target 102744; HLA-B*07:02; ZNF716; ENSG00000182111; TAA
KAFSRSSTL

SEQ ID NO: 102745 - protein, 9 aa, Homo sapiens
  Table A; Target 102745; HLA-B*08:01; ZNF716; ENSG00000182111; TAA
KAFSRSSTL

SEQ ID NO: 102746 - protein, 9 aa, Homo sapiens
  Table A; Target 102746; HLA-B*15:03; ZNF716; ENSG00000182111; TAA
KAFSRSSTL

SEQ ID NO: 102747 - protein, 9 aa, Homo sapiens
  Table A; Target 102747; HLA-B*37:01; ZNF716; ENSG00000182111; TAA
KAFSRSSTL

SEQ ID NO: 102748 - protein, 9 aa, Homo sapiens
  Table A; Target 102748; HLA-B*58:01; ZNF716; ENSG00000182111; TAA
KAFSRSSTL

SEQ ID NO: 102749 - protein, 9 aa, Homo sapiens
  Table A; Target 102749; HLA-C*02:02; ZNF716; ENSG00000182111; TAA
KAFSRSSTL

SEQ ID NO: 102750 - protein, 9 aa, Homo sapiens
  Table A; Target 102750; HLA-C*03:03; ZNF716; ENSG00000182111; TAA
KAFSRSSTL

SEQ ID NO: 102751 - protein, 9 aa, Homo sapiens
  Table A; Target 102751; HLA-C*03:04; ZNF716; ENSG00000182111; TAA
KAFSRSSTL

SEQ ID NO: 102752 - protein, 9 aa, Homo sapiens
  Table A; Target 102752; HLA-C*07:02; ZNF716; ENSG00000182111; TAA
KAFSRSSTL

SEQ ID NO: 102753 - protein, 9 aa, Homo sapiens
  Table A; Target 102753; HLA-C*12:03; ZNF716; ENSG00000182111; TAA
KAFSRSSTL

SEQ ID NO: 102754 - protein, 9 aa, Homo sapiens
  Table A; Target 102754; HLA-C*16:01; ZNF716; ENSG00000182111; TAA
KAFSRSSTL

SEQ ID NO: 102755 - protein, 9 aa, Homo sapiens
  Table A; Target 102755; HLA-C*16:02; ZNF716; ENSG00000182111; TAA
KAFSRSSTL

SEQ ID NO: 102756 - protein, 9 aa, Homo sapiens
  Table A; Target 102756; HLA-C*03:04; ZNF716; ENSG00000182111; TAA
KAFSWSASL

SEQ ID NO: 102757 - protein, 11 aa, Homo sapiens
  Table A; Target 102757; HLA-A*03:01; ZNF716; ENSG00000182111; TAA
KAFSWSASLTK

SEQ ID NO: 102758 - protein, 9 aa, Homo sapiens
  Table A; Target 102758; HLA-B*37:01; ZNF716; ENSG00000182111; TAA
KDSLQKVIL

SEQ ID NO: 102759 - protein, 9 aa, Homo sapiens
  Table A; Target 102759; HLA-B*37:01; ZNF716; ENSG00000182111; TAA
KECGKAFTF

SEQ ID NO: 102760 - protein, 9 aa, Homo sapiens
  Table A; Target 102760; HLA-B*58:01; ZNF716; ENSG00000182111; TAA
KIIHTGEKL

SEQ ID NO: 102761 - protein, 11 aa, Homo sapiens
  Table A; Target 102761; HLA-A*03:01; ZNF716; ENSG00000182111; TAA
KIIHTGEKLYK

SEQ ID NO: 102762 - protein, 8 aa, Homo sapiens
  Table A; Target 102762; HLA-B*07:02; ZNF716; ENSG00000182111; TAA
KPDLITCL

SEQ ID NO: 102763 - protein, 9 aa, Homo sapiens
  Table A; Target 102763; HLA-B*58:01; ZNF716; ENSG00000182111; TAA
KSFNCSSTL

SEQ ID NO: 102764 - protein, 11 aa, Homo sapiens
  Table A; Target 102764; HLA-A*31:01; ZNF716; ENSG00000182111; TAA
KVFGKFSNSNR

SEQ ID NO: 102765 - protein, 11 aa, Homo sapiens
  Table A; Target 102765; HLA-A*29:02; ZNF716; ENSG00000182111; TAA
KVFSRSTLTNY

SEQ ID NO: 102766 - protein, 11 aa, Homo sapiens
  Table A; Target 102766; HLA-A*30:02; ZNF716; ENSG00000182111; TAA
KVFSRSTLTNY

SEQ ID NO: 102767 - protein, 11 aa, Homo sapiens
  Table A; Target 102767; HLA-A*32:01; ZNF716; ENSG00000182111; TAA
KVFSRSTLTNY

SEQ ID NO: 102768 - protein, 8 aa, Homo sapiens
  Table A; Target 102768; HLA-B*37:01; ZNF716; ENSG00000182111; TAA
LDHAQQNL

SEQ ID NO: 102769 - protein, 9 aa, Homo sapiens
  Table A; Target 102769; HLA-A*30:02; ZNF716; ENSG00000182111; TAA
LDHAQQNLY

SEQ ID NO: 102770 - protein, 9 aa, Homo sapiens
  Table A; Target 102770; HLA-B*18:01; ZNF716; ENSG00000182111; TAA
LDHAQQNLY

SEQ ID NO: 102771 - protein, 9 aa, Homo sapiens
  Table A; Target 102771; HLA-C*07:01; ZNF716; ENSG00000182111; TAA
LDHAQQNLY

SEQ ID NO: 102772 - protein, 9 aa, Homo sapiens
  Table A; Target 102772; HLA-C*07:04; ZNF716; ENSG00000182111; TAA
LDHAQQNLY

SEQ ID NO: 102773 - protein, 9 aa, Homo sapiens
  Table A; Target 102773; HLA-C*16:02; ZNF716; ENSG00000182111; TAA
LDHAQQNLY

SEQ ID NO: 102774 - protein, 9 aa, Homo sapiens
  Table A; Target 102774; HLA-C*16:04; ZNF716; ENSG00000182111; TAA
LDHAQQNLY

SEQ ID NO: 102775 - protein, 10 aa, Homo sapiens
  Table A; Target 102775; HLA-A*33:01; ZNF716; ENSG00000182111; TAA
LNQHQIIHTR

SEQ ID NO: 102776 - protein, 9 aa, Homo sapiens
  Table A; Target 102776; HLA-B*57:01; ZNF716; ENSG00000182111; TAA
LSATQNKTF

SEQ ID NO: 102777 - protein, 9 aa, Homo sapiens
  Table A; Target 102777; HLA-B*58:01; ZNF716; ENSG00000182111; TAA
LSATQNKTF

SEQ ID NO: 102778 - protein, 9 aa, Homo sapiens
  Table A; Target 102778; HLA-C*02:02; ZNF716; ENSG00000182111; TAA
LSATQNKTF

SEQ ID NO: 102779 - protein, 9 aa, Homo sapiens
  Table A; Target 102779; HLA-C*16:01; ZNF716; ENSG00000182111; TAA
LSATQNKTF

SEQ ID NO: 102780 - protein, 9 aa, Homo sapiens
  Table A; Target 102780; HLA-C*16:02; ZNF716; ENSG00000182111; TAA
LSATQNKTF

SEQ ID NO: 102781 - protein, 10 aa, Homo sapiens
  Table A; Target 102781; HLA-B*57:01; ZNF716; ENSG00000182111; TAA
LTFRDIAIEF

SEQ ID NO: 102782 - protein, 10 aa, Homo sapiens
  Table A; Target 102782; HLA-A*03:01; ZNF716; ENSG00000182111; TAA
LVSLGIAVSK

SEQ ID NO: 102783 - protein, 10 aa, Homo sapiens
  Table A; Target 102783; HLA-A*03:02; ZNF716; ENSG00000182111; TAA
LVSLGIAVSK

SEQ ID NO: 102784 - protein, 10 aa, Homo sapiens
  Table A; Target 102784; HLA-A*11:01; ZNF716; ENSG00000182111; TAA
LVSLGIAVSK

SEQ ID NO: 102785 - protein, 9 aa, Homo sapiens
  Table A; Target 102785; HLA-B*18:01; ZNF716; ENSG00000182111; TAA
NEMVAKHPV

SEQ ID NO: 102786 - protein, 9 aa, Homo sapiens
  Table A; Target 102786; HLA-B*37:01; ZNF716; ENSG00000182111; TAA
NEMVAKHPV

SEQ ID NO: 102787 - protein, 9 aa, Homo sapiens
  Table A; Target 102787; HLA-B*49:01; ZNF716; ENSG00000182111; TAA
NEMVAKHPV

SEQ ID NO: 102788 - protein, 9 aa, Homo sapiens
  Table A; Target 102788; HLA-A*02:01; ZNF716; ENSG00000182111; TAA
NLVSLGIAV

SEQ ID NO: 102789 - protein, 9 aa, Homo sapiens
  Table A; Target 102789; HLA-B*13:02; ZNF716; ENSG00000182111; TAA
NLVSLGIAV

SEQ ID NO: 102790 - protein, 9 aa, Homo sapiens
  Table A; Target 102790; HLA-A*31:01; ZNF716; ENSG00000182111; TAA
NQHQIIHTR

SEQ ID NO: 102791 - protein, 9 aa, Homo sapiens
  Table A; Target 102791; HLA-A*33:01; ZNF716; ENSG00000182111; TAA
NQHQIIHTR

SEQ ID NO: 102792 - protein, 9 aa, Homo sapiens
  Table A; Target 102792; HLA-A*33:03; ZNF716; ENSG00000182111; TAA
NQHQIIHTR

SEQ ID NO: 102793 - protein, 9 aa, Homo sapiens
  Table A; Target 102793; HLA-A*68:01; ZNF716; ENSG00000182111; TAA
NQHQIIHTR

SEQ ID NO: 102794 - protein, 9 aa, Homo sapiens
  Table A; Target 102794; HLA-C*07:06; ZNF716; ENSG00000182111; TAA
NQHQIIHTR

SEQ ID NO: 102795 - protein, 9 aa, Homo sapiens
  Table A; Target 102795; HLA-B*44:03; ZNF716; ENSG00000182111; TAA
QEDLQVKKC

SEQ ID NO: 102796 - protein, 9 aa, Homo sapiens
  Table A; Target 102796; HLA-B*49:01; ZNF716; ENSG00000182111; TAA
QEDLQVKKC

SEQ ID NO: 102797 - protein, 10 aa, Homo sapiens
  Table A; Target 102797; HLA-A*33:01; ZNF716; ENSG00000182111; TAA
QNKEPQNIKR

SEQ ID NO: 102798 - protein, 10 aa, Homo sapiens
  Table A; Target 102798; HLA-A*33:03; ZNF716; ENSG00000182111; TAA
QNKEPQNIKR

SEQ ID NO: 102799 - protein, 9 aa, Homo sapiens
  Table A; Target 102799; HLA-A*03:01; ZNF716; ENSG00000182111; TAA
RLNQHQIIH

SEQ ID NO: 102800 - protein, 11 aa, Homo sapiens
  Table A; Target 102800; HLA-A*31:01; ZNF716; ENSG00000182111; TAA
RLNQHQIIHTR

SEQ ID NO: 102801 - protein, 10 aa, Homo sapiens
  Table A; Target 102801; HLA-B*07:02; ZNF716; ENSG00000182111; TAA
RPGPPGSREM

SEQ ID NO: 102802 - protein, 10 aa, Homo sapiens
  Table A; Target 102802; HLA-C*07:02; ZNF716; ENSG00000182111; TAA
RPGPPGSREM

SEQ ID NO: 102803 - protein, 9 aa, Homo sapiens
  Table A; Target 102803; HLA-A*03:02; ZNF716; ENSG00000182111; TAA
RSSTLTNHK

SEQ ID NO: 102804 - protein, 8 aa, Homo sapiens
  Table A; Target 102804; HLA-B*58:01; ZNF716; ENSG00000182111; TAA
SATQNKTF

SEQ ID NO: 102805 - protein, 8 aa, Homo sapiens
  Table A; Target 102805; HLA-C*16:01; ZNF716; ENSG00000182111; TAA
SATQNKTF

SEQ ID NO: 102806 - protein, 8 aa, Homo sapiens
  Table A; Target 102806; HLA-C*16:02; ZNF716; ENSG00000182111; TAA
SATQNKTF

SEQ ID NO: 102807 - protein, 9 aa, Homo sapiens
  Table A; Target 102807; HLA-A*30:01; ZNF716; ENSG00000182111; TAA
SEQGIKDSL

SEQ ID NO: 102808 - protein, 9 aa, Homo sapiens
  Table A; Target 102808; HLA-B*27:02; ZNF716; ENSG00000182111; TAA
SEQGIKDSL

SEQ ID NO: 102809 - protein, 9 aa, Homo sapiens
  Table A; Target 102809; HLA-B*37:01; ZNF716; ENSG00000182111; TAA
SEQGIKDSL

SEQ ID NO: 102810 - protein, 9 aa, Homo sapiens
  Table A; Target 102810; HLA-B*40:01; ZNF716; ENSG00000182111; TAA
SEQGIKDSL

SEQ ID NO: 102811 - protein, 9 aa, Homo sapiens
  Table A; Target 102811; HLA-B*40:02; ZNF716; ENSG00000182111; TAA
SEQGIKDSL

SEQ ID NO: 102812 - protein, 9 aa, Homo sapiens
  Table A; Target 102812; HLA-B*44:02; ZNF716; ENSG00000182111; TAA
SEQGIKDSL

SEQ ID NO: 102813 - protein, 9 aa, Homo sapiens
  Table A; Target 102813; HLA-B*44:03; ZNF716; ENSG00000182111; TAA
SEQGIKDSL

SEQ ID NO: 102814 - protein, 9 aa, Homo sapiens
  Table A; Target 102814; HLA-C*16:04; ZNF716; ENSG00000182111; TAA
SEQGIKDSL

SEQ ID NO: 102815 - protein, 8 aa, Homo sapiens
  Table A; Target 102815; HLA-C*14:02; ZNF716; ENSG00000182111; TAA
SFNCSSTL

SEQ ID NO: 102816 - protein, 9 aa, Homo sapiens
  Table A; Target 102816; HLA-B*15:03; ZNF716; ENSG00000182111; TAA
SKPDLITCL

SEQ ID NO: 102817 - protein, 8 aa, Homo sapiens
  Table A; Target 102817; HLA-A*03:02; ZNF716; ENSG00000182111; TAA
SLGIAVSK

SEQ ID NO: 102818 - protein, 8 aa, Homo sapiens
  Table A; Target 102818; HLA-A*29:02; ZNF716; ENSG00000182111; TAA
SLPSTFTY

SEQ ID NO: 102819 - protein, 9 aa, Homo sapiens
  Table A; Target 102819; HLA-A*03:01; ZNF716; ENSG00000182111; TAA
SLPSTFTYH

SEQ ID NO: 102820 - protein, 9 aa, Homo sapiens
  Table A; Target 102820; HLA-A*02:04; ZNF716; ENSG00000182111; TAA
SLQKVILRR

SEQ ID NO: 102821 - protein, 9 aa, Homo sapiens
  Table A; Target 102821; HLA-A*03:01; ZNF716; ENSG00000182111; TAA
SLQKVILRR

SEQ ID NO: 102822 - protein, 9 aa, Homo sapiens
  Table A; Target 102822; HLA-A*31:01; ZNF716; ENSG00000182111; TAA
SLQKVILRR

SEQ ID NO: 102823 - protein, 9 aa, Homo sapiens
  Table A; Target 102823; HLA-A*33:01; ZNF716; ENSG00000182111; TAA
SLQKVILRR

SEQ ID NO: 102824 - protein, 9 aa, Homo sapiens
  Table A; Target 102824; HLA-B*27:05; ZNF716; ENSG00000182111; TAA
SRSSTLTNH

SEQ ID NO: 102825 - protein, 9 aa, Homo sapiens
  Table A; Target 102825; HLA-B*27:05; ZNF716; ENSG00000182111; TAA
SRSTLTNYK

SEQ ID NO: 102826 - protein, 9 aa, Homo sapiens
  Table A; Target 102826; HLA-A*03:02; ZNF716; ENSG00000182111; TAA
SVGECEVHK

SEQ ID NO: 102827 - protein, 9 aa, Homo sapiens
  Table A; Target 102827; HLA-A*11:01; ZNF716; ENSG00000182111; TAA
SVGECEVHK

SEQ ID NO: 102828 - protein, 9 aa, Homo sapiens
  Table A; Target 102828; HLA-A*23:01; ZNF716; ENSG00000182111; TAA
TFRDIAIEF

SEQ ID NO: 102829 - protein, 9 aa, Homo sapiens
  Table A; Target 102829; HLA-A*24:02; ZNF716; ENSG00000182111; TAA
TFRDIAIEF

SEQ ID NO: 102830 - protein, 9 aa, Homo sapiens
  Table A; Target 102830; HLA-A*29:02; ZNF716; ENSG00000182111; TAA
TFRDIAIEF

SEQ ID NO: 102831 - protein, 9 aa, Homo sapiens
  Table A; Target 102831; HLA-C*14:02; ZNF716; ENSG00000182111; TAA
TFRDIAIEF

SEQ ID NO: 102832 - protein, 10 aa, Homo sapiens
  Table A; Target 102832; HLA-B*38:01; ZNF716; ENSG00000182111; TAA
TQDLQSEQGI

SEQ ID NO: 102833 - protein, 9 aa, Homo sapiens
  Table A; Target 102833; HLA-A*32:01; ZNF716; ENSG00000182111; TAA
TQNKTFQTH

SEQ ID NO: 102834 - protein, 10 aa, Homo sapiens
  Table A; Target 102834; HLA-A*03:02; ZNF716; ENSG00000182111; TAA
TQNKTFQTHK

SEQ ID NO: 102835 - protein, 8 aa, Homo sapiens
  Table A; Target 102835; HLA-C*12:03; ZNF716; ENSG00000182111; TAA
VAKHPVTC

SEQ ID NO: 102836 - protein, 10 aa, Homo sapiens
  Table A; Target 102836; HLA-A*29:02; ZNF716; ENSG00000182111; TAA
VFSRSTLTNY

SEQ ID NO: 102837 - protein, 10 aa, Homo sapiens
  Table A; Target 102837; HLA-A*30:02; ZNF716; ENSG00000182111; TAA
VFSRSTLTNY

SEQ ID NO: 102838 - protein, 9 aa, Homo sapiens
  Table A; Target 102838; HLA-A*02:04; ZNF716; ENSG00000182111; TAA
VMLENYRNL

SEQ ID NO: 102839 - protein, 9 aa, Homo sapiens
  Table A; Target 102839; HLA-A*03:01; ZNF716; ENSG00000182111; TAA
VSLGIAVSK

SEQ ID NO: 102840 - protein, 9 aa, Homo sapiens
  Table A; Target 102840; HLA-A*03:02; ZNF716; ENSG00000182111; TAA
VSLGIAVSK

SEQ ID NO: 102841 - protein, 9 aa, Homo sapiens
  Table A; Target 102841; HLA-A*11:01; ZNF716; ENSG00000182111; TAA
VSLGIAVSK

SEQ ID NO: 102842 - protein, 9 aa, Homo sapiens
  Table A; Target 102842; HLA-C*07:06; ZNF716; ENSG00000182111; TAA
VSLGIAVSK
